(19) United States
(12) Patent Application Publication
(10) Pub. No.: US 2022/0160859 A1
(43) Pub. Date: May 26, 2022

(54) COMPOSITIONS AND METHODS FOR ELICITING AN IMMUNE RESPONSE AGAINST CLOSTRIDIUM DIFFICILE

(71) Applicant: Pfizer Inc., New York, NY (US)

(72) Inventors: Kathrin Ute Jansen, New York, NY (US); Annaliesa Sybil Anderson, Upper Saddle River, NJ (US); Alexey Vyacheslavovitch Gribenko, New City, NY (US); Nicholas Randolph Everard Kitchin, Sandwich (GB); Paul Liberator, Holmdel, NJ (US); Michael William Pride, Staten Island, NY (US); Christopher Frederick Webber, Sandwich (GB)

(21) Appl. No.: 17/594,107

(22) PCT Filed: Mar. 30, 2020
(86) PCT No.: PCT/IB2020/053005

§ 371 Date: Oct. 1, 2021

Related U.S. Application Data
(60) Provisional application No. 62/943,297, filed on Dec. 4, 2019.
(60) Provisional application No. 62/925,370, filed on Oct. 24, 2019.
(60) Provisional application No. 62/838,679, filed on Apr. 25, 2019.
(60) Provisional application No. 62/827,693, filed on Apr. 1, 2019.

(51) Int. Cl. A61K 39/08; A61P 31/04; C07K 14/33; C07K 16/12

(52) U.S. Cl. CPC A61K 39/08; A61P 31/04; A61K 2039/55505; C07K 16/1282; C07K 14/33

(57) ABSTRACT

In one aspect, the invention relates to an immunogenic composition that includes a Clostridium difficile toxoid A and/or a C. difficile toxoid B, and methods of use thereof. In another aspect, the invention relates to a method for eliciting an immune response in a human against a C. difficile infection. The method includes administering to the human an effective dose of a composition, which includes a C. difficile toxoid, wherein the composition is administered at least two times, and wherein the immune response against C. difficile toxin A and/or toxin B is sustained.

### CROSS REFERENCE TO RELATED APPLICATIONS

[0001] The present application claims the benefit of U.S. Provisional Patent Application 62/827,693 filed on Apr. 1, 2019, U.S. Provisional Patent Application 62/838,679, filed on Apr. 25, 2019, U.S. Provisional Patent Application 62/925,370, filed on Oct. 24, 2019, and U.S. Provisional Patent Application 62/943,297, filed on Dec. 4, 2019. All of the foregoing applications are hereby incorporated by reference in their entireties.

### FIELD

[0002] The present invention is directed to compositions and methods concerning Clostridium difficile toxoids and methods thereof.

### BACKGROUND

[0003] Clostridium difficile (C. difficile) is a Gram-positive anaerobic bacterium that is associated with gastrointestinal disease in humans. Colonization of C. difficile usually occurs in the colon if the natural gut flora is diminished by treatment with antibiotics. An infection can lead to antibiotic-associated diarrhea and sometimes pseudomembranous colitis through the secretion of the glucosylating toxins, toxin A and toxin B (approximately 308 and 270 kDa, respectively), which are the primary virulence factors of C. difficile.

[0004] In the last decade, the numbers and severity of C. difficile outbreaks in hospitals, nursing homes, and other long-term care facilities increased dramatically. Key factors in this escalation include emergence of hypervirulent pathogenic strains, increased use of antibiotics, improved detection methods, and increased exposure to airborne spores in health care facilities.

[0005] The increasing burden of C difficile infection (CDI) on patients and on the healthcare system demonstrates that prevention of CDI constitutes a significant unmet medical need. To date, there is no approved vaccine to prevent primary or recurrent CDI, and treatment options are non-optimal.

### SUMMARY OF THE INVENTION

[0006] To meet these and other needs, the present invention relates to C. difficile toxoids and methods of use thereof. As used herein, each of the terms “toxoid,” “mutant toxin,” “genetically modified toxin,” “genetically mutated toxin,” “chemically modified toxin,” “chemically inactivated toxin,” and “genetically and chemically inactivated toxin” is considered a toxoid. In one aspect, the invention relates to a C. difficile vaccine currently being evaluated for efficacy and safety in subjects who are at risk for CDI. The selection of an optimal vaccination dose and regimen were based on studies, taking into consideration immunogenicity, safety, and the potential for short- and long-term protection.

[0007] In one aspect, the invention relates to an isolated polypeptide including the amino acid sequence selected from the group consisting of SEQ ID NOs: 762-840. In an aspect, the invention relates to an isolated polypeptide consisting of the amino acid sequence selected from the group consisting of SEQ ID NOs: 762-840. In one embodiment, the polypeptide includes a mutation. In one embodiment, the polypeptide includes three mutations. In another embodiment, the polypeptide includes at least one amino acid side chain chemically modified by 1-ethyl-3-(3-dimethylaminopropyl) carbodiimide) (EDC). In another embodiment, the polypeptide includes at least one amino acid side chain chemically modified by N-Hydroxysuccinimide (NHS). In another embodiment, the polypeptide has an amino acid sequence that is about 60%, 65%, 70%, 75%, 80%, 85%, 86%, 87%, 88%, 89%, 90%, 91%, 92%, 93%, 94%, 95%, 96%, 97%, 98%, 99%, or 100% identical to any one of SEQ ID NOs: 762-840. In another embodiment, the polypeptide includes an epitope selected from any one of the sequences described in FIG. 7. In another embodiment, the polypeptide includes an epitope selected from any one of the sequences described in FIG. 8.

[0008] In another aspect, the invention relates to a composition including a polypeptide described herein; and a pharmaceutically acceptable diluent. In one embodiment, the composition further includes an adjuvant. In one embodiment, the composition further includes aluminum hydroxide. In one embodiment, the composition further includes a CpG oligonucleotide. In one embodiment, the composition further includes aluminum hydroxide and a CpG oligonucleotide.

[0009] In another aspect, the invention relates to an antibody or antigen binding fragment thereof including the amino acid sequence set forth in SEQ ID NO: 841. In another embodiment, the antibody or antigen binding fragment thereof has an amino acid sequence that is about 60%, 65%, 70%, 75%, 80%, 85%, 86%, 87%, 88%, 89%, 90%, 91%, 92%, 93%, 94%, 95%, 96%, 97%, 98%, 99%, or 100% identical to SEQ ID NO: 841.

[0010] In another aspect, the invention relates to a method for eliciting an immune response in a human against Clostridium difficile expressing a toxin including the amino acid sequence selected from the group consisting of SEQ ID NOs: 762-840, the method includes administering to the human an effective dose of a composition including a C. difficile toxoid. In one embodiment, the method includes administering two doses of the composition to the human. In one embodiment, the first dose and the second dose are administered about 30 days apart. In another embodiment, the first dose and the second dose are administered about 6 months apart. In one embodiment, the method includes administering three doses of the composition to the human. In one embodiment, the third dose is administered about 6 months after the first dose. In one embodiment, the human is at least 50 years of age. In one embodiment, the composition includes a C. difficile toxoid A and a C. difficile toxoid B, each having a purity of at least 90% or greater. In one embodiment, the composition includes a C. difficile toxoid A and a C. difficile toxoid B, in a ratio of about 3:1 to about 1:1. In one embodiment, the composition includes a C. difficile toxoid A and a C. difficile toxoid B, in a ratio of 1:1. In one embodiment, the composition includes an adjuvant. In one embodiment, the composition includes an aluminum adjuvant. In one embodiment, the composition includes a first polypeptide having the amino acid sequence SEQ ID NO: 4 and a second polypeptide having the amino acid sequence SEQ ID NO: 6.

### BRIEF DESCRIPTION OF THE DRAWINGS

[0011] FIG. 1 sets forth amino acid sequences for 39 Toxin A variants, SEQ ID Nos: 762-800.

[0012] FIG. 2 sets forth amino acid sequences for 40 Toxin B variants, SEQ ID Nos: 801-840.

[0013] FIG. 3—Phylogenetic Diversity Among the Clostridium difficile Toxin A Variant Types. Phylogenetic tree illustrating the sequence similarity among the 39 TcdA protein variant types identified from whole genome sequence (WGS) of strains in a C difficile collection. Phylogenetic distance and amino acid sequence diversity from TcdA001 (SEQ ID NO: 762), whose sequence was used to make the vaccine antigen (SEQ ID NO: 4, wherein the methionine at position 1 is not present), is reflected by the branch length between the respective variant types and TcdA001. TcdA variant types in bold font correspond to the toxins that have been functionally tested in neutralization assays (see FIG. 5). Numbers in parenthesis adjacent to the TcdA variants in bold font correspond to the pairwise amino acid sequence identity with TcdA001. TcdA variants depicted in the non-bolded font have not yet been evaluated in neutralization assays.

[0014] FIG. 4—Phylogenetic Diversity Among the Clostridium difficile Toxin B Variant Types. Phylogenetic tree illustrating the sequence similarity among the 40 TcdB protein variant types identified from WGS of strains in a C difficile collection. Phylogenetic distance and amino acid sequence diversity from TcdB001, whose sequence was used to make the vaccine antigen (SEQ ID NO: 6, wherein the methionine at position 1 is not present), is reflected by the branch length between the respective variant types and TcdB001. TcdB variant types in bold font correspond to the toxins that have been functionally tested in neutralization assays (see FIG. 5). Numbers in parenthesis adjacent to the TcdB variants in bold font correspond to the pairwise amino acid sequence identity with TcdB001. TcdB variants depicted in the non-bolded font have not yet been evaluated in neutralization assays.

[0015] FIG. 5—Human Immune Sera is Able to Neutralize the Cytotoxicity of a TcdB Variant Heterologous to the Vaccine Antigen. Human serum from vaccinated subjects is able to neutralize the cytotoxic activity of toxin variant TcdB011 (SEQ ID NO: 811), which shares just 87% amino acid sequence identity with variant TcdB001 (FIG. 4). The level of cellular ATP, a measure of cell viability, is determined using the luminescent Cell Titer-Glo® reagent and reported as relative luminescence units (RLU). The green dashed line illustrates the luminescence output when cells are incubated in the absence of toxin, while the red dashed line provides an indication of cell viability in the presence of toxin variant TcdB011 (tested at a level of toxin equivalent to 4×EC₅₀ determined in a cytotoxicity assay). Sera from three vaccinated human subjects and a human reference standard are titrated from left to right and illustrate the ability of these serum samples to block or neutralize the cytotoxic effect of toxin variant TcdB011, a variant that shares just 87% amino acid sequence identity with variant TcdB001.

[0016] FIG. 6—sets forth the amino acid sequence (SEQ ID NO: 841) for an IgG1 antibody.

[0017] FIG. 7—epitope sequences

[0018] FIG. 8—epitope sequences

[0019] FIG. 9—binding epitopes of TxdA-specific monoclonal antibodies

[0020] FIG. 10—binding epitopes of TxdB-specific monoclonal antibodies

[0021] FIG. 11—Vaccine induces antibodies that neutralize toxins A and B regardless of their sequence diversity

[0022] FIG. 12A-B—Phylogenetic tree illustrating TcdA variants (FIG. 12A). Phylogenetic tree illustrating TcdB variants (FIG. 12B).

[0023] FIG. 13—Graph illustrating grouping of C. difficile isolates into one of five clades.

### SEQUENCE IDENTIFIERS

[0024] SEQ ID NO: 1 sets forth the amino acid sequence for wild-type C. difficile 630 toxin A (TcdA).

[0025] SEQ ID NO: 2 sets forth the amino acid sequence for wild-type C. difficile 630 toxin B (TcdB).

[0026] SEQ ID NO: 3 sets forth the amino acid sequence for a mutant TcdA having a mutation at positions 285 and 287, as compared to SEQ ID NO: 1.

[0027] SEQ ID NO: 4 sets forth the amino acid sequence for a mutant TcdA having a mutation at positions 285, 287, and 700, as compared to SEQ ID NO: 1.

[0028] SEQ ID NO: 5 sets forth the amino acid sequence for a mutant TcdB having a mutation at positions 286 and 288, as compared to SEQ ID NO: 2.

[0029] SEQ ID NO: 6 sets forth the amino acid sequence for a mutant TcdB having a mutation at positions 286, 288, and 698, as compared to SEQ ID NO: 2.

[0030] SEQ ID NO: 7 sets forth the amino acid sequence for a mutant TcdA having a mutation at positions 269, 272, 285, 287, 460, 462, and 700, as compared to SEQ ID NO: 1

[0031] SEQ ID NO: 8 sets forth the amino acid sequence for a mutant TcdB having a mutation at positions 270, 273, 286, 288, 461, 463, and 698, as compared to SEQ ID NO: 2 SEQ ID NO: 9 sets forth a DNA sequence encoding a wild-type C. difficile 630 toxin A (TcdA).

[0032] SEQ ID NO: 10 sets forth a DNA sequence encoding a wild-type C. difficile 630 toxin B

[0033] (TcdB).

[0034] SEQ ID NO: 11 sets forth a DNA sequence encoding SEQ ID NO: 3

[0035] SEQ ID NO: 12 sets forth a DNA sequence encoding SEQ ID NO: 4

[0036] SEQ ID NO: 13 sets forth a DNA sequence encoding SEQ ID NO: 5

[0037] SEQ ID NO: 14 sets forth a DNA sequence encoding SEQ ID NO: 6

[0038] SEQ ID NO: 15 sets forth the amino acid sequence for wild-type C. difficile R20291 TcdA.

[0039] SEQ ID NO: 16 sets forth a DNA sequence encoding SEQ ID NO: 15.

[0040] SEQ ID NO: 17 sets forth the amino acid sequence for wild-type C. difficile CD196 TcdA.

[0041] SEQ ID NO: 18 sets forth a DNA sequence encoding SEQ ID NO: 17.

[0042] SEQ ID NO: 19 sets forth the amino acid sequence for wild-type C. difficile VP110463 TcdA.

[0043] SEQ ID NO: 20 sets forth a DNA sequence encoding SEQ ID NO: 19.

[0044] SEQ ID NO: 21 sets forth the amino acid sequence for wild-type C. difficile R20291 TcdB.

[0045] SEQ ID NO: 22 sets forth a DNA sequence encoding SEQ ID NO: 21.

[0046] SEQ ID NO: 23 sets forth the amino acid sequence for wild-type C. difficile CD196 TcdB.

[0047] SEQ ID NO: 24 sets forth a DNA sequence encoding SEQ ID NO: 23.

[0048] SEQ ID NO: 25 sets forth the amino acid sequence for wild-type C. difficile VP110463 TcdB.

[0049] SEQ ID NO: 26 sets forth a DNA sequence encoding SEQ ID NO: 25.

[0050] SEQ ID NO: 27 sets forth a DNA sequence of a pathogenicity locus of wild-type C. difficile VP110463.

[0051] SEQ ID NO: 28 sets forth the amino acid sequence for residues 101 to 293 of SEQ ID NO:

[0052] 1.

[0053] SEQ ID NO: 29 sets forth the amino acid sequence for residues 1 to 542 of SEQ ID NO: 1.

[0054] SEQ ID NO: 30 sets forth the amino acid sequence for residues 101 to 293 of SEQ ID NO: 2.

[0055] SEQ ID NO: 31 sets forth the amino acid sequence for residues 1 to 543 of SEQ ID NO: 2.

[0056] SEQ ID NO: 32 sets forth the amino acid sequence for residues 543 to 809 of SEQ ID NO: 1

[0057] SEQ ID NO: 33 sets forth the amino acid sequence for residues 544 to 767 of SEQ ID NO: 2.

[0058] SEQ ID NO: 34 sets forth the amino acid sequence for a mutant TcdA, wherein residues 101, 269, 272, 285, 287, 460, 462, 541, 542, 543, 589, 655, and 700 may be any amino acid.

[0059] SEQ ID NO: 35 sets forth the amino acid sequence for a mutant TcdB, wherein 102, 270, 273, 286, 288, 384, 461, 463, 520, 543, 544, 587, 600, 653, 698, and 751 may be any amino acid.

[0060] SEQ ID NO: 36 sets forth the amino acid sequence for the variable light chain of a neutralizing antibody of C. difficile TcdA (A3-25 mAb).

[0061] SEQ ID NO: 37 sets forth the amino acid sequence for the variable heavy chain of a neutralizing antibody of C. difficile TcdA (A3-25 mAb).

[0062] SEQ ID NO: 38 sets forth the amino acid sequence for CDR1 of the variable light chain of neutralizing antibody of C. difficile TcdA (A3-25 mAb).

[0063] SEQ ID NO: 39 sets forth the amino acid sequence for CDR2 of the variable light chain of neutralizing antibody of C. difficile TcdA (A3-25 mAb).

[0064] SEQ ID NO: 40 sets forth the amino acid sequence for CDR3 of the variable light chain of neutralizing antibody of C. difficile TcdA (A3-25 mAb).

[0065] SEQ ID NO: 41 sets forth the amino acid sequence for CDR1 of the variable heavy chain of neutralizing antibody of C. difficile TcdA (A3-25 mAb).

[0066] SEQ ID NO: 42 sets forth the amino acid sequence for CDR2 of the variable heavy chain of neutralizing antibody of C. difficile TcdA (A3-25 mAb).

[0067] SEQ ID NO: 43 sets forth the amino acid sequence for CDR3 of the variable heavy chain of neutralizing antibody of C. difficile TcdA (A3-25 mAb).

[0068] SEQ ID NO: 44 sets forth a DNA sequence encoding SEQ ID NO: 3.

[0069] SEQ ID NO: 45 sets forth a DNA sequence encoding SEQ ID NO: 4.

[0070] SEQ ID NO: 46 sets forth a DNA sequence encoding SEQ ID NO: 5.

[0071] SEQ ID NO: 47 sets forth a DNA sequence encoding SEQ ID NO: 6.

[0072] SEQ ID NO: 48 sets forth the nucleotide sequence of immunostimulatory oligonucleotide ODN CpG 24555.

[0073] SEQ ID NO: 49 sets forth the amino acid sequence for the variable heavy chain of a C. difficile TcdB neutralizing antibody (B8-26 mAb).

[0074] SEQ ID NO: 50 sets forth the amino acid sequence for the signal peptide of the variable heavy chain of a C. difficile TcdB neutralizing antibody (B8-26 mAb).

[0075] SEQ ID NO: 51 sets forth the amino acid sequence for CDR1 of the variable heavy chain of a C. difficile TcdB neutralizing antibody (B8-26 mAb).

[0076] SEQ ID NO: 52 sets forth the amino acid sequence for CDR2 of the variable heavy chain of a C. difficile TcdB neutralizing antibody (B8-26 mAb).

[0077] SEQ ID NO: 53 sets forth the amino acid sequence for CDR3 of the variable heavy chain of a C. difficile TcdB neutralizing antibody (B8-26 mAb).

[0078] SEQ ID NO: 54 sets forth the amino acid sequence for the constant region of the variable heavy chain of a C. difficile TcdB neutralizing antibody (B8-26 mAb).

[0079] SEQ ID NO: 55 sets forth the amino acid sequence for the variable light chain of a C. difficile TcdB neutralizing antibody (B8-26 mAb).

[0080] SEQ ID NO: 56 sets forth the amino acid sequence for the signal peptide of the variable light chain of a C. difficile TcdB neutralizing antibody (B8-26 mAb).

[0081] SEQ ID NO: 57 sets forth the amino acid sequence for CDR1 of the variable light chain of a C. difficile TcdB neutralizing antibody (B8-26 mAb).

[0082] SEQ ID NO: 58 sets forth the amino acid sequence for CDR2 of the variable light chain of a C. difficile TcdB neutralizing antibody (B8-26 mAb).

[0083] SEQ ID NO: 59 sets forth the amino acid sequence for CDR3 of the variable light chain of a C. difficile TcdB neutralizing antibody (B8-26 mAb).

[0084] SEQ ID NO: 60 sets forth the amino acid sequence for the variable heavy chain of a C. difficile TcdB neutralizing antibody (B59-3 mAb).

[0085] SEQ ID NO: 61 sets forth the amino acid sequence for the signal peptide of the variable heavy chain of a C. difficile TcdB neutralizing antibody (B59-3 mAb).

[0086] SEQ ID NO: 62 sets forth the amino acid sequence for CDR1 of the variable heavy chain of a C. difficile TcdB neutralizing antibody (B59-3 mAb).

[0087] SEQ ID NO: 63 sets forth the amino acid sequence for CDR2 of the variable heavy chain of a C. difficile TcdB neutralizing antibody (B59-3 mAb).

[0088] SEQ ID NO: 64 sets forth the amino acid sequence for CDR3 of the variable heavy chain of a C. difficile TcdB neutralizing antibody (B59-3 mAb).

[0089] SEQ ID NO: 65 sets forth the amino acid sequence for the constant region of the variable heavy chain of a C. difficile TcdB neutralizing antibody (B59-3 mAb).

[0090] SEQ ID NO: 66 sets forth the amino acid sequence for the variable light chain of a C. difficile TcdB neutralizing antibody (B59-3 mAb).

[0091] SEQ ID NO: 67 sets forth the amino acid sequence for the signal peptide of the variable light chain of a C. difficile TcdB neutralizing antibody (B59-3 mAb).

[0092] SEQ ID NO: 68 sets forth the amino acid sequence for CDR1 of the variable light chain of a C. difficile TcdB neutralizing antibody (B59-3 mAb).

[0093] SEQ ID NO: 69 sets forth the amino acid sequence for CDR2 of the variable light chain of a C. difficile TcdB neutralizing antibody (B59-3 mAb).

[0094] SEQ ID NO: 70 sets forth the amino acid sequence for CDR3 of the variable light chain of a C. difficile TcdB neutralizing antibody (B59-3 mAb).

[0095] SEQ ID NO: 71 sets forth the amino acid sequence for the variable heavy chain of a C. difficile TcdB neutralizing antibody (B9-30 mAb).

[0096] SEQ ID NO: 72 sets forth the amino acid sequence for the signal peptide of the variable heavy chain of a C. difficile TcdB neutralizing antibody (B9-30 mAb).

[0097] SEQ ID NO: 73 sets forth the amino acid sequence for CDR1 of the variable heavy chain of a C. difficile TcdB neutralizing antibody (B9-30 mAb).

[0098] SEQ ID NO: 74 sets forth the amino acid sequence for CDR2 of the variable heavy chain of a C. difficile TcdB neutralizing antibody (B9-30 mAb).

[0099] SEQ ID NO: 75 sets forth the amino acid sequence for CDR3 of the variable heavy chain of a C. difficile TcdB neutralizing antibody (B9-30 mAb).

[0100] SEQ ID NO: 76 sets forth the amino acid sequence for the constant region of the variable heavy chain of a C. difficile TcdB neutralizing antibody (B9-30 mAb).

[0101] SEQ ID NO: 77 sets forth the amino acid sequence for the variable light chain of a C. difficile TcdB neutralizing antibody (B9-30 mAb).

[0102] SEQ ID NO: 78 sets forth the amino acid sequence for the signal peptide of the variable light chain of a C. difficile TcdB neutralizing antibody (B9-30 mAb).

[0103] SEQ ID NO: 79 sets forth the amino acid sequence for CDR1 of the variable light chain of a C. difficile TcdB neutralizing antibody (B9-30 mAb).

[0104] SEQ ID NO: 80 sets forth the amino acid sequence for CDR2 of the variable light chain of a C. difficile TcdB neutralizing antibody (B9-30 mAb).

[0105] SEQ ID NO: 81 sets forth the amino acid sequence for CDR3 of the variable light chain of a C. difficile TcdB neutralizing antibody (B9-30 mAb).

[0106] SEQ ID NO: 82 sets forth the amino acid sequence for a mutant TcdB, wherein a residue at positions 102, 270, 273, 286, 288, 384, 461, 463, 520, 543, 544, 587, 600, 653, 698, and 751 may be any amino acid.

[0107] SEQ ID NO: 83 sets forth the amino acid sequence for a mutant TcdA having a mutation at positions 269, 272, 285, 287, 460, 462, and 700, as compared to SEQ ID NO: 1, wherein the methionine at position 1 is absent.

[0108] SEQ ID NO: 84 sets forth the amino acid sequence for a mutant C. difficile toxin A having a mutation at positions 285, 287, and 700, as compared to SEQ ID NO: 1, wherein the methionine at position 1 is absent.

[0109] SEQ ID NO: 85 sets forth the amino acid sequence for a mutant C. difficile toxin B having a mutation at positions 270, 273, 286, 288, 461, 463, and 698, as compared to SEQ ID NO: 2, wherein the methionine at position 1 is absent.

[0110] SEQ ID NO: 86 sets forth the amino acid sequence for a mutant C. difficile toxin B having a mutation at positions 286, 288, and 698, as compared to SEQ ID NO: 2, wherein the methionine at position 1 is absent.

[0111] SEQ ID NO: 87 sets forth the amino acid sequence for wild-type C. difficile 2004013 TcdA.

[0112] SEQ ID NO: 88 sets forth the amino acid sequence for wild-type C. difficile 2004111 TcdA.

[0113] SEQ ID NO: 89 sets forth the amino acid sequence for wild-type C. difficile 2004118 TcdA.

[0114] SEQ ID NO: 90 sets forth the amino acid sequence for wild-type C. difficile 2004205 TcdA.

[0115] SEQ ID NO: 91 sets forth the amino acid sequence for wild-type C. difficile 2004206 TcdA.

[0116] SEQ ID NO: 92 sets forth the amino acid sequence for wild-type C. difficile 2005022 TcdA.

[0117] SEQ ID NO: 93 sets forth the amino acid sequence for wild-type C. difficile 2005088 TcdA.

[0118] SEQ ID NO: 94 sets forth the amino acid sequence for wild-type C. difficile 2005283 TcdA.

[0119] SEQ ID NO: 95 sets forth the amino acid sequence for wild-type C. difficile 2005325 TcdA.

[0120] SEQ ID NO: 96 sets forth the amino acid sequence for wild-type C. difficile 2005359 TcdA.

[0121] SEQ ID NO: 97 sets forth the amino acid sequence for wild-type C. difficile 2006017 TcdA.

[0122] SEQ ID NO: 98 sets forth the amino acid sequence for wild-type C. difficile 2007070 TcdA.

[0123] SEQ ID NO: 99 sets forth the amino acid sequence for wild-type C. difficile 2007217 TcdA.

[0124] SEQ ID NO: 100 sets forth the amino acid sequence for wild-type C. difficile 2007302 TcdA.

[0125] SEQ ID NO: 101 sets forth the amino acid sequence for wild-type C. difficile 2007816 TcdA.

[0126] SEQ ID NO: 102 sets forth the amino acid sequence for wild-type C. difficile 2007838 TcdA.

[0127] SEQ ID NO: 103 sets forth the amino acid sequence for wild-type C. difficile 2007858 TcdA.

[0128] SEQ ID NO: 104 sets forth the amino acid sequence for wild-type C. difficile 2007886 TcdA.

[0129] SEQ ID NO: 105 sets forth the amino acid sequence for wild-type C. difficile 2008222 TcdA.

[0130] SEQ ID NO: 106 sets forth the amino acid sequence for wild-type C. difficile 2009078 TcdA.

[0131] SEQ ID NO: 107 sets forth the amino acid sequence for wild-type C. difficile 2009087 TcdA.

[0132] SEQ ID NO: 108 sets forth the amino acid sequence for wild-type C. difficile 2009141 TcdA.

[0133] SEQ ID NO: 109 sets forth the amino acid sequence for wild-type C. difficile 2009292 TcdA.

[0134] SEQ ID NO: 110 sets forth the amino acid sequence for wild-type C. difficile 2004013 TcdB.

[0135] SEQ ID NO: 111 sets forth the amino acid sequence for wild-type C. difficile 2004111 TcdB.

[0136] SEQ ID NO: 112 sets forth the amino acid sequence for wild-type C. difficile 2004118 TcdB.

[0137] SEQ ID NO: 113 sets forth the amino acid sequence for wild-type C. difficile 2004205 TcdB.

[0138] SEQ ID NO: 114 sets forth the amino acid sequence for wild-type C. difficile 2004206 TcdB.

[0139] SEQ ID NO: 115 sets forth the amino acid sequence for wild-type C. difficile 2005022 TcdB.

[0140] SEQ ID NO: 116 sets forth the amino acid sequence for wild-type C. difficile 2005088 TcdB.

[0141] SEQ ID NO: 117 sets forth the amino acid sequence for wild-type C. difficile 2005283 TcdB.

[0142] SEQ ID NO: 118 sets forth the amino acid sequence for wild-type C. difficile 2005325 TcdB.

[0143] SEQ ID NO: 119 sets forth the amino acid sequence for wild-type C. difficile 2005359 TcdB.

[0144] SEQ ID NO: 120 sets forth the amino acid sequence for wild-type C. difficile 2006017 TcdB.

[0145] SEQ ID NO: 121 sets forth the amino acid sequence for wild-type C. difficile 2006376 TcdB.

[0146] SEQ ID NO: 122 sets forth the amino acid sequence for wild-type C. difficile 2007070 TcdB.

[0147] SEQ ID NO: 123 sets forth the amino acid sequence for wild-type C. difficile 2007217 TcdB.

[0148] SEQ ID NO: 124 sets forth the amino acid sequence for wild-type C. difficile 2007302 TcdB.

[0149] SEQ ID NO: 125 sets forth the amino acid sequence for wild-type C. difficile 2007816 TcdB.

[0150] SEQ ID NO: 126 sets forth the amino acid sequence for wild-type C. difficile 2007838 TcdB.

[0151] SEQ ID NO: 127 sets forth the amino acid sequence for wild-type C. difficile 2007858 TcdB.

[0152] SEQ ID NO: 128 sets forth the amino acid sequence for wild-type C. difficile 2007886 TcdB.

[0153] SEQ ID NO: 129 sets forth the amino acid sequence for wild-type C. difficile 2008222 TcdB.

[0154] SEQ ID NO: 130 sets forth the amino acid sequence for wild-type C. difficile 2009078 TcdB.

[0155] SEQ ID NO: 131 sets forth the amino acid sequence for wild-type C. difficile 2009087 TcdB.

[0156] SEQ ID NO: 132 sets forth the amino acid sequence for wild-type C. difficile 2009141 TcdB.

[0157] SEQ ID NO: 133 sets forth the amino acid sequence for wild-type C. difficile 2009292 TcdB.

[0158] SEQ ID NO: 134 sets forth the amino acid sequence for wild-type C. difficile 014 TcdA.

[0159] SEQ ID NO: 135 sets forth the amino acid sequence for wild-type C. difficile 015 TcdA.

[0160] SEQ ID NO: 136 sets forth the amino acid sequence for wild-type C. difficile 020 TcdA.

[0161] SEQ ID NO: 137 sets forth the amino acid sequence for wild-type C. difficile 023 TcdA.

[0162] SEQ ID NO: 138 sets forth the amino acid sequence for wild-type C. difficile 027 TcdA.

[0163] SEQ ID NO: 139 sets forth the amino acid sequence for wild-type C. difficile 029 TcdA.

[0164] SEQ ID NO: 140 sets forth the amino acid sequence for wild-type C. difficile 046 TcdA.

[0165] SEQ ID NO: 141 sets forth the amino acid sequence for wild-type C. difficile 014 TcdB.

[0166] SEQ ID NO: 142 sets forth the amino acid sequence for wild-type C. difficile 015 TcdB.

[0167] SEQ ID NO: 143 sets forth the amino acid sequence for wild-type C. difficile 020 TcdB.

[0168] SEQ ID NO: 144 sets forth the amino acid sequence for wild-type C. difficile 023 TcdB.

[0169] SEQ ID NO: 145 sets forth the amino acid sequence for wild-type C. difficile 027 TcdB.

[0170] SEQ ID NO: 146 sets forth the amino acid sequence for wild-type C. difficile 029 TcdB.

[0171] SEQ ID NO: 147 sets forth the amino acid sequence for wild-type C. difficile 046 TcdB.

[0172] SEQ ID NO: 148 sets forth the amino acid sequence for wild-type C. difficile 001 TcdA.

[0173] SEQ ID NO: 149 sets forth the amino acid sequence for wild-type C. difficile 002 TcdA.

[0174] SEQ ID NO: 150 sets forth the amino acid sequence for wild-type C. difficile 003 TcdA.

[0175] SEQ ID NO: 151 sets forth the amino acid sequence for wild-type C. difficile 004 TcdA.

[0176] SEQ ID NO: 152 sets forth the amino acid sequence for wild-type C. difficile 070 TcdA.

[0177] SEQ ID NO: 153 sets forth the amino acid sequence for wild-type C. difficile 075 TcdA.

[0178] SEQ ID NO: 154 sets forth the amino acid sequence for wild-type C. difficile 077 TcdA.

[0179] SEQ ID NO: 155 sets forth the amino acid sequence for wild-type C. difficile 081 TcdA.

[0180] SEQ ID NO: 156 sets forth the amino acid sequence for wild-type C. difficile 117 TcdA.

[0181] SEQ ID NO: 157 sets forth the amino acid sequence for wild-type C. difficile 131 TcdA.

[0182] SEQ ID NO: 158 sets forth the amino acid sequence for wild-type C. difficile 001 TcdB.

[0183] SEQ ID NO: 159 sets forth the amino acid sequence for wild-type C. difficile 002 TcdB.

[0184] SEQ ID NO: 160 sets forth the amino acid sequence for wild-type C. difficile 003 TcdB.

[0185] SEQ ID NO: 161 sets forth the amino acid sequence for wild-type C. difficile 004 TcdB.

[0186] SEQ ID NO: 162 sets forth the amino acid sequence for wild-type C. difficile 070 TcdB.

[0187] SEQ ID NO: 163 sets forth the amino acid sequence for wild-type C. difficile 075 TcdB.

[0188] SEQ ID NO: 164 sets forth the amino acid sequence for wild-type C. difficile 077 TcdB.

[0189] SEQ ID NO: 165 sets forth the amino acid sequence for wild-type C. difficile 081 TcdB.

[0190] SEQ ID NO: 166 sets forth the amino acid sequence for wild-type C. difficile 117 TcdB.

[0191] SEQ ID NO: 167 sets forth the amino acid sequence for wild-type C. difficile 131 TcdB.

[0192] SEQ ID NO: 168 sets forth the amino acid sequence for wild-type C. difficile 053 TcdA.

[0193] SEQ ID NO: 169 sets forth the amino acid sequence for wild-type C. difficile 078 TcdA.

[0194] SEQ ID NO: 170 sets forth the amino acid sequence for wild-type C. difficile 087 TcdA.

[0195] SEQ ID NO: 171 sets forth the amino acid sequence for wild-type C. difficile 095 TcdA.

[0196] SEQ ID NO: 172 sets forth the amino acid sequence for wild-type C. difficile 126 TcdA.

[0197] SEQ ID NO: 173 sets forth the amino acid sequence for wild-type C. difficile 053 TcdB.

[0198] SEQ ID NO: 174 sets forth the amino acid sequence for wild-type C. difficile 078 TcdB.

[0199] SEQ ID NO: 175 sets forth the amino acid sequence for wild-type C. difficile 087 TcdB.

[0200] SEQ ID NO: 176 sets forth the amino acid sequence for wild-type C. difficile 095 TcdB.

[0201] SEQ ID NO: 177 sets forth the amino acid sequence for wild-type C. difficile 126 TcdB.

[0202] SEQ ID NO: 178 sets forth the amino acid sequence for wild-type C. difficile 059 TcdA.

[0203] SEQ ID NO: 179 sets forth the amino acid sequence for wild-type C. difficile 059 TcdB.

[0204] SEQ ID NO: 180 sets forth the amino acid sequence for wild-type C. difficile 106 TcdA.

[0205] SEQ ID NO: 181 sets forth the amino acid sequence for wild-type C. difficile 106 TcdB.

[0206] SEQ ID NO: 182 sets forth the amino acid sequence for wild-type C. difficile 017 TcdB.

[0207] SEQ ID NO: 183 sets forth the amino acid sequence for a mutant TcdA having a mutation at positions 285, 287, 700, 972, and 978 as compared to SEQ ID NO: 1.

[0208] SEQ ID NO: 184 sets forth the amino acid sequence for a mutant TcdB having a mutation at positions 286, 288, 698, 970, and 976 as compared to SEQ ID NO: 2.

[0209] SEQ ID NO: 185 through SEQ ID NO: 195 each set forth the amino acid sequence for an exemplary mutant toxin.

[0210] SEQ ID NO: 196 through SEQ ID NO: 212 each set forth the amino acid sequence for an exemplary mutant toxin A.

[0211] SEQ ID NO: 213 through SEQ ID NO: 222 each set forth the amino acid sequence for an exemplary mutant toxin B.

[0212] SEQ ID NO: 223 through SEQ ID NO: 236 each set forth the amino acid sequence for an exemplary mutant toxin A.

[0213] SEQ ID NO: 237 through SEQ ID NO: 243 each set forth the amino acid sequence for an exemplary mutant toxin B.

[0214] SEQ ID NO: 244 through SEQ ID NO: 245 each set forth the amino acid sequence for an exemplary mutant toxin A.

[0215] SEQ ID NO: 246 through SEQ ID NO: 249 each set forth the amino acid sequence for an exemplary mutant toxin B.

[0216] SEQ ID NO: 250 through SEQ ID NO: 253 each set forth the amino acid sequence for an exemplary mutant toxin A.

[0217] SEQ ID NO: 254 sets forth the amino acid sequence for an exemplary mutant toxin.

[0218] SEQ ID NO: 255 through SEQ ID NO: 263 each set forth the amino acid sequence for an exemplary mutant toxin A.

[0219] SEQ ID NO: 264 through SEQ ID NO: 269 each set forth the amino acid sequence for an exemplary mutant toxin B.

[0220] SEQ ID NO: 270 through SEQ ID NO: 275 each set forth the amino acid sequence for an exemplary mutant toxin.

[0221] SEQ ID NO: 276 through SEQ ID NO: 323 each set forth the amino acid sequence for an exemplary mutant toxin A.

[0222] SEQ ID NO: 324 through SEQ ID NO: 373 each set forth the amino acid sequence for an exemplary mutant toxin B.

[0223] SEQ ID NO: 374 through SEQ ID NO: 421 each set forth the amino acid sequence for an exemplary mutant toxin A.

[0224] SEQ ID NO: 422 through SEQ ID NO: 471 each set forth the amino acid sequence for an exemplary mutant toxin B.

[0225] SEQ ID NO: 472 through SEQ ID NO: 519 each set forth the amino acid sequence for an exemplary mutant toxin A.

[0226] SEQ ID NO: 568 through SEQ ID NO: 615 each set forth the amino acid sequence for an exemplary mutant toxin B.

[0227] SEQ ID NO: 520 through SEQ ID NO: 567 each set forth the amino acid sequence for an exemplary mutant toxin A.

[0228] SEQ ID NO: 616 through SEQ ID NO: 663 each set forth the amino acid sequence for an exemplary mutant toxin B.

[0229] SEQ ID NO: 664 through SEQ ID NO: 711 each set forth the amino acid sequence for an exemplary mutant toxin A.

[0230] SEQ ID NO: 712 through SEQ ID NO: 761 each set forth the amino acid sequence for an exemplary mutant toxin B.

[0231] SEQ ID NO: 762 through SEQ ID NO: 800 each set forth the amino acid sequence for a toxin A variant. See FIG. 1.

[0232] SEQ ID NO: 801 through SEQ ID NO: 840 each set forth the amino acid sequence for a toxin B variant. See FIG. 2.

[0233] SEQ ID NO: 841 sets forth the amino acid sequence for an IgG1 antibody.

[0234] SEQ ID NO: 842-SEQ ID NO: 870 sets forth the amino acid sequence for an epitope. (see FIG. 7)

[0235] SEQ ID NO: 871-SEQ ID NO: 887) sets forth the amino acid sequence for an epitope. (see FIG. 8)

### DETAILED DESCRIPTION OF THE INVENTION

[0236] The inventors determined the bacterial genome sequences of >500 C. difficile disease-causing isolates and analyzed sequences coding for the respective toxins in these isolates. Surprisingly, 39 unique TcdA (FIG. 1) and 40 unique TcdB (FIG. 2) protein variants were identified. The inventors further discovered that PCR-ribotyping is not a strain typing tool that is predictive of the toxin variant diversity associated with C. difficile disease-causing isolates.

[0237] In one aspect, the invention relates to compositions and methods that may be used to treat, ameliorate, reduce the risk of, and/or prevent infection by C. difficile, comprising a polypeptide that comprises a sequence selected from the group consisting of SEQ ID Nos: 762-800. In an aspect, the invention relates to a composition comprising a polypeptide comprising a sequence selected from the group consisting of SEQ ID Nos: 762-800. In an aspect, the invention relates to a composition comprising a polypeptide consisting of a sequence selected from the group consisting of SEQ ID Nos: 762-800. In another aspect, the invention relates to compositions and methods that may be used to treat, ameliorate, reduce the risk of, and/or prevent infection by C. difficile, comprising a polypeptide that comprises a sequence selected from the group consisting of SEQ ID Nos: 801-840. In an aspect, the invention relates to a composition comprising a polypeptide comprising a sequence selected from the group consisting of SEQ ID Nos: 801-840. In an aspect, the invention relates to a composition comprising a polypeptide consisting of a sequence selected from the group consisting of SEQ ID Nos: 801-840. In one embodiment, the polypeptide comprises a mutation to produce a toxoid, as described below. In another embodiment, the polypeptide is inactivated by chemical treatment, as described below, to produce a toxoid. In yet another embodiment, the polypeptide comprises a mutation and is inactivated by chemical treatment. In yet another embodiment, the composition is for use to treat, ameliorate, reduce the risk of, and/or prevent infection by C. difficile.

[0238] In a preferred embodiment, the toxoid A includes any one of the epitopes described in FIG. 7. In a preferred embodiment, the toxoid B includes any one of the epitopes described in FIG. 8.

[0239] In another aspect, the invention relates to the discovery that a composition comprising a C. difficile toxoid A and a C. difficile toxoid B (derived from strain 630) elicited antibodies that are capable of binding to a corresponding toxin produced by different strains of C. difficile. See, for example, FIG. 11. Surprisingly, the composition elicited an antibody that neutralizes the cytotoxic activity of a toxin (e.g., toxin B) having less than 90% amino acid sequence identity to the wild-type toxin from strain 630. More specifically, toxin B variant TcdB011 (SEQ ID NO: 811) has about 87% amino acid sequence identity with TcdB001 (SEQ ID NO: 801), and yet polyclonal human immune sera from a human who received a dose of a composition comprising a toxoid A and a toxoid B effectively neutralized the cytotoxic activity of variant TcdB011 (SEQ ID NO: 811). See Example 4 and FIG. 5.

[0240] Accordingly, the composition comprising toxoids elicited “cross-reactive” antibodies and binding fragments thereof. “Cross-reactivity” as used herein refers to the ability to react with similar antigenic sites on toxin variants having a sequence that is less than 100% identical to the toxin sequence from which the toxoid antigen was derived. In one embodiment, the antibody elicited by the composition has the ability to react with a corresponding antigenic site on a toxin variant having a sequence identity that is less than 99.9%, 99.8%, 99.7%, 99.6%, 99.5%, 99.4%, 99.3%, 99.2%, 99.1%, 99%, 98.9%, 98.8%, 98.7%, 98.6%, 98.5%, 98.4%, 98.3%, 98.2%, 98.1%, 98%, 97.9%, 97.8%, 97.7%, 97.6%, 97.5%, 97.4%, 97.3%, 97.2%, 97.1%, 97%, 96%, 95%, 94%, 93%, 92%, 91%, 90%, 89%, 88%, 87%, 86%, or 85% identical to the toxin sequence from which the toxoid antigen was derived. In one embodiment, the antibody elicited by the composition has the ability to react with a corresponding antigenic site on a toxin variant having a sequence identity that about 99.9%, about 99.8%, about 99.7%, about 99.6%, about 99.5%, about 99.4%, about 99.3%, about 99.2%, about 99.1%, about 99%, about 98.9%, about 98.8%, about 98.7%, about 98.6%, about 98.5%, about 98.4%, about 98.3%, about 98.2%, about 98.1%, about 98%, about 97.9%, about 97.8%, about 97.7%, about 97.6%, about 97.5%, about 97.4%, about 97.3%, about 97.2%, about 97.1%, about 97%, about 96%, about 95%, about 94%, about 93%, about 92%, about 91%, about 90%, about 89%, about 88%, about 87%, about 86%, or about 85% identical to the toxin sequence from which the toxoid antigen was derived.

[0241] For example, in one embodiment, cross-reactivity refers to the ability to react with similar antigenic sites on toxin variants having sequences that are less than 100% identical to the sequence of SEQ ID NO: 1 and SEQ ID NO: 2. In another embodiment, cross-reactivity refers to the ability to react with similar antigenic sites on a toxin variant having a sequence that is less than 100% identical to the respective sequence of TcdA001 (SEQ ID NO: 762) or TcdB001 (SEQ ID NO: 801).

[0242] In an exemplary embodiment, a composition comprising a polypeptide having the amino acid sequence SEQ ID NO: 4, wherein the methionine is not present (toxoid A), and a second polypeptide having the amino acid sequence SEQ ID NO: 6, wherein the methionine is not present (toxoid B), elicits cross-reactive antibodies and binding fragments thereof that bind to toxin A produced by a C. difficile strain, wherein the toxin A has an amino acid sequence that is less than 100% identical to SEQ ID NO: 1, and to toxin B produced by a C. difficile strain, wherein the toxin B has an amino acid sequence that is less than 100% identical to SEQ ID NO: 2. In one embodiment, the toxin A has an amino acid sequence that is about 99.9%, about 99.8%, about 99.7%, about 99.6%, about 99.5%, about 99.4%, about 99.3%, about 99.2%, about 99.1%, about 99%, about 98.9%, about 98.8%, about 98.7%, about 98.6%, about 98.5%, about 98.4%, about 98.3%, about 98.2%, about 98.1%, about 98%, about 97.9%, about 97.8%, about 97.7%, about 97.6%, about 97.5%, about 97.4%, about 97.3%, about 97.2%, about 97.1%, about 97%, about 96%, about 95%, about 94%, about 93%, about 92%, about 91%, about 90%, about 89%, about 88%, about 87%, about 86%, or about 85% identical to SEQ ID NO: 1. In one embodiment, the toxin B has an amino acid sequence that is about 99.9%, about 99.8%, about 99.7%, about 99.6%, about 99.5%, about 99.4%, about 99.3%, about 99.2%, about 99.1%, about 99%, about 98.9%, about 98.8%, about 98.7%, about 98.6%, about 98.5%, about 98.4%, about 98.3%, about 98.2%, about 98.1%, about 98%, about 97.9%, about 97.8%, about 97.7%, about 97.6%, about 97.5%, about 97.4%, about 97.3%, about 97.2%, about 97.1%, about 97%, about 96%, about 95%, about 94%, about 93%, about 92%, about 91%, about 90%, about 89%, about 88%, about 87%, about 86%, or about 85% identical to SEQ ID NO: 2.

[0243] Exemplary compositions are provided. For instance, compositions comprising an effective amount of C. difficile toxoid A and toxoid B (e.g., from about 40 to about 500 μg/dose, such as about any of 40, 50, 60, 70, 80, 90, 100, 1 10, 120, 130, 140, 1 50, 160, 170, 180, 190, 200, 210, 220, 230, 240, 250, 260, 270, 280, 290, 300, 310, 320, 330, 340, 350, 360, 370, 380, 390, 400, 410, 420, 430, 440, 450, 460, 470, 480, 490, or 500 μg/dose, such as about 50 to about 100 μg/dose (w/w, total amount of toxoids A and B in the composition)) at an effective toxoid A:B ratio (e.g., about any of 10%, 20%, 30%, 40%, 50%, 60%, 70%, 3:1, 3:2, or 1:1 toxoid A to toxoid B by weight), and with a sufficient purity (e.g., at least about 80 to about 100%, such as about any of 80, 85, 90, 95 or 90-100% (w/w)), using one or more administrations (e.g., at least two, three administrations or doses) by any suitable route (e.g., intramuscularly), each dose of a multiple dose administration regimen being suitably separated from one another (e.g., by at least about one to about ten days such as about any of one, two, three, four, five, six, seven, eight, nine or ten, such as about seven days) are provided. The length of time (time interval) between doses would be understood by those of ordinary skill to vary depending on the individual and that that interval should be long enough (e.g., as measured in days) such that the immune response from the prior dose both has time to develop (e.g., to be primed) and is not in any way inhibited by the subsequent dose (e.g., the boosting dose or doses).

[0244] In one embodiment, the composition used in the vaccination regimen of the present invention includes from about 40 to about 500 μg/dose of C. difficile toxoid A. In an embodiment the composition includes from about 50 to about 400 μg/dose of C. difficile toxoid A. In one embodiment, the composition includes from about 50 to about 200 μg/dose of C. difficile toxoid A. In one embodiment the composition includes from about 50 to about 150 μg/dose. In one embodiment the composition includes about any of 40, 50, 60, 70, 80, 90, 100, 110, 120, 130, 140, 150, 160, 170, 180, 190, 200, 210, 220, 230, 240, 250, 260, 270, 280, 290, 300, 310, 320, 330, 340, 350, 360, 370, 380, 390, 400, 410, 420, 430, 440, 450, 460, 470, 480, 490, or 500 μg/dose of C. difficile toxoid A. In one embodiment, the composition includes about 50 μg/dose of C. difficile toxoid A. In another embodiment, the composition includes about 100 μg/dose of C. difficile toxoid A.

[0245] In one embodiment the composition used in the vaccination regimen of the present invention includes from about 40 to about 500 μg/dose of C. difficile toxoid B. In one embodiment the composition includes from about 50 to about 400 μg/dose of C. difficile toxoid B. In one embodiment the composition includes from about 50 to about 200 μg/dose of C. difficile toxoid B. In one embodiment the composition includes from about 50 to about 150 μg/dose. In one embodiment the composition includes about any of 40, 50, 60, 70, 80, 90, 100, 110, 120, 130, 140, 150, 160, 170, 180, 190, 200, 210, 220, 230, 240, 250, 260, 270, 280, 290, 300, 310, 320, 330, 340, 350, 360, 370, 380, 390, 400, 410, 420, 430, 440, 450, 460, 470, 480, 490, or 500 μg/dose of C. difficile toxoid B. In one embodiment, the composition includes about 50 μg/dose of C. difficile toxoid B. In another embodiment, the composition includes about 100 μg/dose of C. difficile toxoid B.

[0246] In one embodiment the composition used in the vaccination regimen of the present invention includes C. difficile toxoid A and B at the doses disclosed herein. In one embodiment, the toxoid A to B ratio is 3:1, 3:2, or 1:1 toxoid A to toxoid B by weight. In one embodiment, the toxoid A to B ratio is 1:3, 2:3, or 1:1 toxoid A to toxoid B by weight. In one embodiment, the toxoid A to B ratio is 1:1 toxoid A to toxoid B by weight. In one embodiment the composition used in the vaccination regimen of the present invention includes C. difficile toxoid A and B with a purity of at least about 80 to about 100%. In one embodiment the composition used in the vaccination regimen of the present invention includes C. difficile toxoid A and B with a purity of at least about 90 to about 100%. In one embodiment the composition used in the vaccination regimen of the present invention includes C. difficile toxoid A and B with a purity of about 80, 85, 90, 95 or 100% (w/w).

[0247] In one embodiment the compositions disclosed herein are administered once. In one embodiment the compositions disclosed herein are administered two times. In one embodiment the compositions disclosed herein are administered three times. In one embodiment the compositions disclosed herein are administered four times.

[0248] In one embodiment the compositions disclosed herein are administered two times at the same dose. In one embodiment the compositions disclosed herein are administered three times at the same dose. In one embodiment the compositions disclosed herein are administered four times at the same dose.

[0249] In one embodiment the composition of the present invention is administered by any suitable route. In one embodiment, the compositions disclosed herein are administered by intramuscular, intraperitoneal, intradermal or subcutaneous routes. In one embodiment the compositions disclosed herein are administered subcutaneously or intramuscularly. In one embodiment the compositions disclosed herein are administered intramuscularly.

[0250] In one embodiment of the present invention, each dose of a multiple dose administration regimen is suitably separated from one another. In one embodiment, the compositions disclosed herein are administered two times each dose being separated from one another by about one to about ten days. In one embodiment, the compositions disclosed herein are administered two times each dose being separated from one another by about two to nine days. In one embodiment, the compositions disclosed herein are administered two times each dose being separated from one another by about one, two, three, four, five, six, seven, eight, nine or ten days. In one embodiment, the compositions disclosed herein are administered two times each dose being separated from one another by about six days. In one embodiment, the compositions disclosed herein are administered two times each dose being separated from one another by about seven days. In one embodiment, the compositions disclosed herein are administered two times each dose being separated from one another by about eight days. In one embodiment, the compositions disclosed herein are administered two times each dose being separated from one another by about one to about four months. In one embodiment, the compositions disclosed herein are administered two times each dose being separated from one another by about one, two, three or four months. In one embodiment, the compositions disclosed herein are administered two times each dose being separated from one another by about one month. In one embodiment, the compositions disclosed herein are administered two times each dose being separated from one another by about two months.

[0251] In one embodiment, the compositions disclosed herein are administered three times the first and second dose being separated from one another by about one to about ten days and the third dose being separated from the first dose by about 15 to 45 days. In one embodiment, the compositions disclosed herein are administered three times the first and second dose being separated from one another by about 5 to about 8 days and the third dose being separated from the first dose by about 20 to 35 days. In one embodiment, the compositions disclosed herein are administered three times the first and second dose being separated from one another by about 6 to about 7 days and the third dose being separated from the first dose by about 25 to 35 days. In one embodiment, the compositions disclosed herein are administered three times the first and second dose being separated from one another by about seven days and the third dose being separated from the first dose by about 30 days.

[0252] In one embodiment, the compositions disclosed herein are administered three times the first and second dose being separated from one another by about one to about four months and the third dose being separated from the first dose by about 5 to 10 months. In one embodiment, the compositions disclosed herein are administered three times the first and second dose being separated from one another by about one to two months and the third dose being separated from the first dose by about 5 to 8 months. In one embodiment, the compositions disclosed herein are administered three times the first and second dose being separated from one another by about one month and the third dose being separated from the first dose by about 6 months. In one embodiment, the compositions disclosed herein are administered three times the first and second dose being separated from one another by about one month and the third dose being separated from the first dose by about 5 months. In one embodiment, the compositions disclosed herein are administered three times the first and second dose being separated from one another by about one month and the third dose being separated from the first dose by about 7 months.

[0253] In one embodiment, the compositions disclosed herein are administered four times the first and second dose being separated from one another by about one to about ten days, the third dose being separated from the first dose by about 15 to 45 days and the fourth and third dose being separated from one another by about 6 months to about 2 years. In one embodiment, the compositions disclosed herein are administered four times the first and second dose being separated from one another by about 5 to about 8 days, the third dose being separated from the first dose by about 20 to 35 days and the fourth and third dose being separated from one another by about 10 months to about 1.5 years. In one embodiment, the compositions disclosed herein are administered four times the first and second dose being separated from one another by about 6 to about 7 days, the third dose being separated from the first dose by about 25 to 35 days and the fourth and third dose being separated from one another by about 11 months to about 13 months. In one embodiment, the compositions disclosed herein are administered four times the first and second dose being separated from one another by about seven days, the third dose being separated from the first dose by about 30 days and the fourth and third dose being separated from one another by 1 year.

[0254] In one embodiment, the compositions disclosed herein are administered four times the first and second dose being separated from one another by about one to about four months, the third dose being separated from the first dose by about 5 to 10 months and the fourth dose being separated from the third dose by about 6 months to 2 years. In one embodiment, the compositions disclosed herein are administered four times the first and second dose being separated from one another by about one to two months, the third dose being separated from the first dose by about 5 to 8 months and the fourth dose being separated from the third dose by about 10 months to 1.5 years. In one embodiment, the compositions disclosed herein are administered four times the first and second dose being separated from one another by about one month, the third dose being separated from the first dose by about 6 months and the fourth dose being separated from the third dose by about 11 months to 13 months. In one embodiment, the compositions disclosed herein are administered four times the first and second dose being separated from one another by about one month, the third dose being separated from the first dose by about 6 months and the fourth dose being separated from the third dose by about 12 months.

[0255] In one embodiment the compositions given in any of the multi-dose regimen disclosed herein are given at the same dose (i.e. same quantity of C. difficile toxoid A and/or B). In one embodiment the compositions given in any of the multi-dose regimen disclosed herein are given at the same (i.e. same dose and same ingredients).

[0256] In one embodiment the compositions given in any of the multi-dose regimen disclosed herein are given at different doses. In one embodiment the compositions given in any of the multi-dose regimen disclosed herein are given at the same dose of antigen (i.e. same quantity of C. difficile toxoid A and/or B) but may comprise different ingredients (e.g. different adjuvants).

[0257] In some embodiments, the second administration is at least one, two, three, four, five, six, seven, eight, nine or ten days after the first administration (e.g., day 0) and the third administration is at least about 20-200 (e.g., about 20, 30, 40, 50, 60, 70, 80, 90, 100, 110, 120, 130, 140, 150, 160, 170, 180, 190, or 200, such as about 30 or about 180 days) days after the first administration. For instance, the method may comprise first, second and/or third administrations wherein the second administration is at least 7 days after the first administration and the third administration is at least about 30 days and/or at least about 180 days after the first or second administration. In some embodiments, the second administration is about seven days after the first administration and the third administration is about 30 days after the first administration.

[0258] Upon administration of such compositions using such methods to a host/subject, an immune response is typically observed, which typically includes a humoral immune response and may involve a cellular immune response.

[0259] In certain embodiments, the method may comprise administering the immunogenic composition to a human, subject at risk for infection. In some embodiments, the human subject may be at least about any of 40, 50, 65 years or older. In some embodiments, the human subject may be about 40 to about 65 years of age. In some embodiments, the human subject may be 65-75 years of age. Thus, methods for administering the compositions are also provided. Methods for making the compositions are described herein and are available to those of ordinary skill in the art.

[0260] In one aspect, the invention relates to methods for immunizing a subject (e.g., a human being) against C. difficile by administering thereto a composition comprising one or more antigens of C. difficile. In one aspect, the invention relates to a composition disclosed herein for use in a method for immunizing a subject against C. difficile. In one aspect, the invention relates to a composition disclosed herein for use in a method for immunizing a human subject against C. difficile. In one embodiment, the human subject is 40-90 years of age. In one embodiment, the human subject is 50-85 years of age. In one embodiment, the human subject is 60-85 years of age. In an embodiment, the human subject is 65-85 years of age. In one embodiment, the human subject is 65-69 years of age. In an embodiment, the human subject is 70-79 years of age. In one embodiment, the human subject is 75-79 years of age. In one embodiment, the human subject is at least 60, 61, 62, 63, 64, 65, 66, 67, 68, 69, 70, 71, 72, 73, 74, 75, 76, 77, 78, 79, 80, 81, 82, 83, 84, 85, 86, 87, 88, 89 or 90 years of age. In one embodiment, the human subject is at least 65, 66, 67, 68, 69, 70, 71, 72, 73, 74, 75, 76, 77, 78, 79, 80, 81, 82, 83, 84 or 85 years of age.

[0261] For instance, a suitable composition may comprise a total of about 50 or about 100 μg (or about 50-100 μg) C. difficile toxoid (toxoid A and toxoid B) at an approximate toxoid A to toxoid B ratio of about 3:2, with or without adjuvant (e.g., aluminum hydroxide). For comparison purposes, the antigen-containing composition may be administered to one group of subjects and a placebo composition (e.g., 0.9% normal saline) administered (e.g., on the same schedule) to another group. Immunological data and safety data may be obtained from the subjects on particular days (e.g., days 0, 14, 30, 60, 180, and/or 210, and/or up to 1000 days after the first administration). Administration of the composition may take place on, for example, days 0 (first administration), about day 7 (second administration), about day 30 (third administration) and/or about day 180 (alternative third administration or fourth administration).

[0262] The composition may comprise C. difficile toxoid A and toxoid B at an effective toxoid A:B ratio (e.g., about any of 3:1, 3:2, or 1:1 toxoid A to toxoid B by weight) at a sufficient purity (e.g., about 90% or higher purity (w/w)). For instance, the composition may comprise a highly purified (e.g., >90% (w/w/)) preparation of C. difficile toxoids A & B in an approximate toxoid A to toxoid B ratio of about 3:2. Such compositions may be prepared using any of the available methods of preparation, e.g., as described in WIPO Patent Application WO/2012/143902, U.S. Pat. No. 9,187,536, and WIPO Patent Application WO/2014/060898, which are each incorporated by reference herein in their respective entireties.

[0263] The term “C. difficile toxoid” is used herein to refer to a C. difficile toxin (Toxin A or Toxin B) that has been partially or completely inactivated. A toxin is inactivated if it has less toxicity (e.g., 100%, 99%, 98%, 80%, 70%, 60%, 50%, 40%, 30%, 20%, 10% or less toxicity or any value therebetween) than untreated toxin, as measured by for example an in vitro cytotoxicity assay or by animal toxicity. C. difficile toxoids can be produced by purification of toxins from C. difficile cultures and inactivation of toxins by chemical (e.g., formaldehyde, glutaraldehyde, peroxide or oxygen treatment). Alternatively, wild type or mutant C. difficile toxins that lack or have reduced toxicity can be produced using recombinant methods and/or alternative chemical crosslinking agents. For example, genetic mutations resulting in reduced toxicity can be made. Wild type or mutant C. difficile toxins lacking specific regions to reduce toxicity can also be made.

[0264] The C. difficile toxoid or mutant C. difficile toxin refers to a molecule that exhibits a structure or sequence that differs from the corresponding wild-type structure or sequence, e.g., by having crosslinks as compared to the corresponding wild-type structure and/or by having at least one mutation, as compared to the corresponding wild-type sequence when optimally aligned, such as by the programs GAP or BESTFIT using default gap weights. The term toxoid or mutant toxin as used herein further exhibits a functional property (e.g., abrogated glucosyltransferase and/or abrogated cysteine protease activity) that differs from the corresponding wild-type molecule.

[0265] The toxoid as used herein may be any of the toxoids or mutant C. difficile toxins as described in WIPO Patent Application WO/2012/143902, U.S. Pat. No. 9,187,536, and WIPO Patent Application WO/2014/060898, which are each incorporated by reference herein in their respective entireties. That is, the toxoid as used herein may be any of the polypeptides as described in WIPO Patent Application WO/2012/143902, U.S. Pat. No. 9,187,536, and WIPO Patent Application WO/2014/060898, which are each incorporated by reference herein in their respective entireties. A C. difficile toxin from any of the wild-type strains described above may be used as a source from which a toxoid or mutant C. difficile toxin is produced. Preferably, C. difficile 630 is the source from which a C. difficile toxoid is produced.

[0266] In one embodiment, the toxoid refers to a polypeptide that has any one sequence selected from SEQ ID NO: 1 to SEQ ID NO: 840, wherein the initial methionine is absent, and wherein the polypeptide has been contacted with a chemical crosslinker, such as, for example, formaldehyde or EDC, as described herein, and/or has been genetically mutated. More specifically, in one embodiment, the toxoid is a polypeptide having the amino acid sequence set forth in any one of SEQ ID NOs: 1-8, 15, 17, 19, 21, 23, 25, 28-35, 82-761, and 762-840. In another embodiment, the polypeptide has an amino acid sequence that is about 60%, 65%, 70%, 75%, 80%, 85%, 86%, 87%, 88%, 89%, 90%, 91%, 92%, 93%, 94%, 95%, 96%, 97%, 98%, 99%, or 100% identical to any one of SEQ ID NOs: 1-8, 15, 17, 19, 21, 23, 25, 28-35, 82-761, and 762-840. In another embodiment, the polypeptide has an amino acid sequence having at least 500, 550, 600, 650, 700, 750, 800, 850, 900, 950, 1000, 1050, 1100, 1150, 1200, 1250, 1300, 1350, 1400, 1450, 1500, 1550, 1600, 1650, 1700, 1750, 1800, 1850, 1900, 1950, 2000, 2050, 2100, 2150, or 2200 consecutive amino acids to any one of SEQ ID NOs: 1-8, 15, 17, 19, 21, 23, 25, 28-35, 82-761, and 762-840.

[0267] The mutation may involve a substitution, deletion, truncation or modification of the wild type amino acid residue normally located at that position. Accordingly, the polypeptide may be any one of a fusion polypeptide, glycosylated polypeptide, non-glycosylated polypeptide, lipidated polypeptide, non-lipidated polypeptide, phosphorylated polypeptide, non-phosphorylated polypeptide, myristoylated polypeptide, non-myristoylated polypeptide, monomeric polypeptide, multimeric polypeptide, particulate polypeptide, denatured polypeptide, etc. Preferably, the mutation is a non-conservative amino acid substitution. The mutant toxins of the invention may be prepared by techniques known in the art for preparing mutations, such as, for example, site-directed mutagenesis, mutagenesis using a mutagen (e.g., UV light), etc. Preferably, site-directed mutagenesis is used. Alternatively, a nucleic acid molecule having an objective sequence may be directly synthesized. Such chemical synthesis methods are known in the art.

[0268] In the present invention, the mutant C. difficile toxin includes at least one mutation in a glucosyltransferase domain, relative to the corresponding wild-type C. difficile toxin. In one embodiment, the glucosyltransferase domain includes at least two mutations. Preferably, the mutation decreases or abrogates glucosyltransferase enzyme activity of the toxin, as compared to the glucosyltransferase enzyme activity of the corresponding wild-type C. difficile toxin.

[0269] An exemplary C. difficile toxoid A includes a glucosyltransferase domain including SEQ ID NO: 29 having an amino acid substitution at positions 285 and 287, and a cysteine protease domain comprising SEQ ID NO: 32 having an amino acid substitution at position 158, relative to the corresponding wild-type C. difficile toxin A. For example, such a mutant C. difficile TcdA includes the amino acid sequence set forth in SEQ ID NO: 4, wherein the initial methionine is not present. In an embodiment, the mutant C. difficile toxin A consists of the amino acid sequence set forth in SEQ ID NO: 4, wherein the initial methionine is not present. In another embodiment, the mutant C. difficile toxin A includes the amino acid sequence set forth in SEQ ID NO: 84. In an embodiment, the mutant C. difficile toxin A consists of the amino acid sequence set forth in SEQ ID NO: 84. Further examples of a C. difficile toxoid A include the amino acid sequence set forth in SEQ ID NO: 7, which has a D269A, R272A, D285A, D287A, E460A, R462A, and C700A mutation, as compared to SEQ ID NO: 1, wherein the initial methionine is optionally not present. In an embodiment, the mutant C. difficile toxin A consists of the amino acid sequence set forth in SEQ ID NO: 7. In an embodiment, the mutant C. difficile toxin A consists of the amino acid sequence set forth in SEQ ID NO: 7, wherein the initial methionine is not present. In another embodiment, the mutant C. difficile toxin A includes the amino acid sequence set forth in SEQ ID NO: 83. In an embodiment, the mutant C. difficile toxin A consists of the amino acid sequence set forth in SEQ ID NO: 83.

[0270] An exemplary C. difficile toxoid B includes the amino acid sequence set forth in SEQ ID NO: 6, wherein the initial methionine is not present. In an embodiment, the mutant C. difficile toxin B consists of the amino acid sequence set forth in SEQ ID NO: 6, wherein the initial methionine is not present. In another embodiment, the mutant C. difficile toxin A includes the amino acid sequence set forth in SEQ ID NO: 86. In an embodiment, the mutant C. difficile toxin B consists of the amino acid sequence set forth in SEQ ID NO: 86. Further examples of a mutant C. difficile TcdB include the amino acid sequence set forth in SEQ ID NO: 8, which has a D270A, R273A, D286A, D288A, D461A, K463A, and C698A mutation, as compared to SEQ ID NO: 2, and wherein the initial methionine of SEQ ID NO: 8 is optionally not present. In an embodiment, the mutant C. difficile toxin B consists of the amino acid sequence set forth in SEQ ID NO: 8. In an embodiment, the mutant C. difficile toxin B consists of the amino acid sequence set forth in SEQ ID NO: 8, wherein the initial methionine is not present. In another embodiment, the mutant C. difficile toxin B includes the amino acid sequence set forth in SEQ ID NO: 85. In an embodiment, the mutant C. difficile toxin B consists of the amino acid sequence set forth in SEQ ID NO: 85.

[0271] In addition to generating an immune response in a mammal, the toxoids described herein also have reduced cytotoxicity compared to the corresponding wild-type C. difficile toxin. Preferably, the immunogenic compositions are safe and have minimal (e.g., about a 6-8 log₁₀ reduction) to no cytotoxicity, relative to the cytotoxicity of a respective wild-type toxin, for administration in mammals.

[0272] As used herein, the term cytotoxicity is a term understood in the art and refers to apoptotic cell death and/or a state in which one or more usual biochemical or biological functions of a cell are aberrantly compromised, as compared to an identical cell under identical conditions but in the absence of the cytotoxic agent. Toxicity can be quantitated, for example, in cells or in mammals as the amount of an agent needed to induce 50% cell death (i.e., EC₅₀ or ED₅₀, respectively) or by other methods known in the art.

[0273] Assays for indicating cytotoxicity are known in the art, such as cell rounding assays. Additional exemplary cytotoxicity assays known in the art include glucosylation assays relating to phosphorimaging of Ras labeled with [¹⁴C]glucose assays and preferably the in vitro cytotoxicity assay described in WIPO Patent Application WO/2012/143902, U.S. Pat. No. 9,187,536, and WIPO Patent Application WO/2014/060898, which are each incorporated by reference herein in their respective entireties, wherein EC₅₀ may refer to a concentration of an immunogenic composition that exhibits at least about 50% of cytopathogenic effect (CPE) in a cell, preferably a human diploid fibroblast cell (e.g., IMR90 cell (ATCC CCL-186™), as compared to an identical cell under identical conditions in the absence of the toxin. The in vitro cytotoxicity assay may also be used to assess the concentration of a composition that inhibits at least about 50% of a wild-type C. difficile toxin-induced cytopathogenic effect (CPE) in a cell, preferably a human diploid fibroblast cell (e.g., IMR90 cell (ATCC CCL-186™), as compared to an identical cell under identical conditions in the absence of the toxin.

[0274] In one embodiment, the cytotoxicity of the immunogenic composition is reduced by at least about 1000, 2000, 3000, 4000, 5000-, 6000-, 7000-, 8000-, 9000-, 10000-, 11000-, 12000-, 13000-fold, 14000-fold, 15000-fold, or more, as compared to the corresponding wild-type C. difficile toxin.

[0275] In another embodiment, the cytotoxicity of the immunogenic composition is reduced by at least about 2-log₁₀, more preferably by about 3-logᵢₙ, and most preferably by about 4-logo or more, relative to the corresponding wild-type toxin under identical conditions. For example, a mutant C. difficile TcdB may have an EC₅₀ value of about 10⁻⁹ g/ml as measured in a standard cytopathic effect assay (CPE), as compared to an exemplary wild-type C. difficile TcdB which may have an EC₅₀ value of at least about 10⁻¹² g/ml.

[0276] In yet another embodiment, the cytotoxicity of the mutant C. difficile toxin has an EC₅₀ of at least about 50 μg/ml, 100 μg/ml, 200 μg/ml, 300 μg/ml, 400 μg/ml, 500 μg/ml, 600 μg/ml, 700 μg/ml, 800 μg/ml, 900 μg/ml, 1000 μg/ml or greater, as measured by, for example, an in vitro cytotoxicity assay. Accordingly, in a preferred embodiment, the immunogenic compositions and mutant toxins are biologically safe for administration to mammals.

[0277] In one embodiment, the toxoid is a polypeptide that has any one sequence selected from SEQ ID NO: 1 to SEQ ID NO: 840, more specifically, the toxoid is a polypeptide having the amino acid sequence set forth in any one of SEQ ID NOs: 1-8, 15, 17, 19, 21, 23, 25, 28-35, 82-761, and 762-840, wherein the initial methionine is absent, and wherein the polypeptide has been contacted with a chemical crosslinker, such as, for example, formaldehyde or EDC, as described herein. In an embodiment, the toxoid is a polypeptide that has a sequence of SEQ ID NO: 4, wherein the initial methionine is absent, and wherein the polypeptide has been contacted with a chemical crosslinker. In an embodiment, the toxoid is a polypeptide that has a sequence of SEQ ID NO: 84, and wherein the polypeptide has been contacted with a chemical crosslinker. In an embodiment, the toxoid is a polypeptide that has a sequence of SEQ ID NO: 7, wherein the initial methionine is absent, and wherein the polypeptide has been contacted with a chemical crosslinker. In an embodiment, the toxoid is a polypeptide that has a sequence of SEQ ID NO: 83, and wherein the polypeptide has been contacted with a chemical crosslinker. In an embodiment, the toxoid is a polypeptide that has a sequence of SEQ ID NO: 6, wherein the initial methionine is absent, and wherein the polypeptide has been contacted with a chemical crosslinker. In an embodiment, the toxoid is a polypeptide that has a sequence of SEQ ID NO: 86, and wherein the polypeptide has been contacted with a chemical crosslinker. In an embodiment, the toxoid is a polypeptide that has a sequence of SEQ ID NO: 8, wherein the initial methionine is absent, and wherein the polypeptide has been contacted with a chemical crosslinker. In an embodiment, the toxoid is a polypeptide that has a sequence of SEQ ID NO: 85, and wherein the polypeptide has been contacted with a chemical crosslinker. Crosslinking (also referred to as “chemical inactivation” or “inactivation” herein) is a process of chemically joining two or more molecules by a covalent bond. The terms “crosslinking reagents,” “crosslinking agents,” and “crosslinkers” refer to molecules that are capable of reacting with and/or chemically attaching to specific functional groups (primary amines, sulfhydryls, carboxyls, carbonyls, etc.) on peptides, polypeptides, and/or proteins. In one embodiment, the molecule may contain two or more reactive ends that are capable of reacting with and/or chemically attaching to specific functional groups (primary amines, sulfhydryls, carboxyls, carbonyls, etc.) on peptides, polypeptides, and/or proteins. Preferably, the chemical crosslinking agent is water-soluble. In another preferred embodiment, the chemical crosslinking agent is a heterobifunctional crosslinker. In another embodiment, the chemical crosslinking agent is not a bifunctional crosslinker. Chemical crosslinking agents are known in the art.

[0278] Exemplary suitable chemical crosslinking agents include formaldehyde; formalin; acetaldehyde; propionaldehyde; water-soluble carbodiimides (RN═C═NR′), which include 1-Ethyl-3-(3-Dimethylaminopropyl)-Carbodiimide (EDC), 1-Ethyl-3-(3-Dimethylaminopropyl)-Carbodiimide Hydrochloride, 1-Cyclohexyl-3-(2-morpholinyl-(4-ethyl)carbodiimide metho-p-toluenesulfonate (CMC), N,N′-dicyclohexylcarbodiimide (DCC), and N,N′-diisopropylcarbodiimide (DIC), and derivatives thereof; and N-hydroxysuccinimide (NHS); phenylglyoxal; and/or UDP-dialdehyde.

[0279] Preferably, the crosslinking agent is EDC. When a mutant C. difficile toxin polypeptide is chemically modified by EDC (e.g., by contacting the polypeptide with EDC), in one embodiment, the polypeptide includes (a) at least one crosslink between a side chain of an aspartic acid residue of the polypeptide and a side chain of a lysine residue of the polypeptide. In one embodiment, the polypeptide includes (b) at least one crosslink between a side chain of a glutamic acid residue of the polypeptide and a side chain of a lysine residue of the polypeptide. In one embodiment, the polypeptide includes (c) at least one crosslink between the carboxyl group at the C-terminus of the polypeptide and the amino group of the N-terminus of the polypeptide. In one embodiment, the polypeptide includes (d) at least one crosslink between the carboxyl group at the C-terminus of the polypeptide and a side chain of a lysine residue of the polypeptide. In one embodiment, the polypeptide includes (e) at least one crosslink between a side chain of an aspartic acid residue of the polypeptide and a side chain of a lysine residue of a second isolated polypeptide. In one embodiment, the polypeptide includes (f) at least one crosslink between a side chain of a glutamic acid residue of the polypeptide and a side chain of a lysine residue of a second isolated polypeptide. In one embodiment, the polypeptide includes (g) at least one crosslink between the carboxyl group at the C-terminus of the polypeptide and the amino group of the N-terminus of a second isolated polypeptide. In one embodiment, the polypeptide includes (h) at least one crosslink between the carboxyl group at the C-terminus of the polypeptide and a side chain of a lysine residue of a second isolated polypeptide.

[0280] The “second isolated polypeptide” refers to any isolated polypeptide that is present during the reaction with EDC. In one embodiment, the second isolated polypeptide is a mutant C. difficile toxin polypeptide having an identical sequence as the first isolated polypeptide. In another embodiment, the second isolated polypeptide is a mutant C. difficile toxin polypeptide having a different sequence from the first isolated polypeptide.

[0281] In one embodiment, the polypeptide includes at least two modifications selected from the (a)-(d) modifications. In an exemplary embodiment, the polypeptide includes (a) at least one crosslink between a side chain of an aspartic acid residue of the polypeptide and a side chain of a lysine residue of the polypeptide and (b) at least one crosslink between a side chain of a glutamic acid residue of the polypeptide and a side chain of a lysine residue of the polypeptide. In a further embodiment, the polypeptide includes at least three modifications selected from the (a)-(d) modifications. In yet a further embodiment, the polypeptide includes the (a), (b), (c), and (d) modifications.

[0282] When more than one mutant polypeptide is present during chemical modification by EDC, in one embodiment, the resulting composition includes at least one of any of the (a)-(h) modifications. In one embodiment, the composition includes at least two modifications selected from the (a)-(h) modifications. In a further embodiment, the composition includes at least three modifications selected from the (a)-(h) modifications. In yet a further embodiment, the composition includes at least four modifications selected from the (a)-(h) modifications. In another embodiment, the composition includes at least one of each of the (a)-(h) modifications.

[0283] In an exemplary embodiment, the resulting composition includes (a) at least one crosslink between a side chain of an aspartic acid residue of the polypeptide and a side chain of a lysine residue of the polypeptide; and (b) at least one crosslink between a side chain of a glutamic acid residue of the polypeptide and a side chain of a lysine residue of the polypeptide. In one embodiment, the composition further includes (c) at least one crosslink between the carboxyl group at the C-terminus of the polypeptide and the amino group of the N-terminus of the polypeptide; and (d) at least one crosslink between the carboxyl group at the C-terminus of the polypeptide and a side chain of a lysine residue of the polypeptide.

[0284] In another exemplary embodiment, the resulting composition includes (e) at least one crosslink between a side chain of an aspartic acid residue of the polypeptide and a side chain of a lysine residue of a second isolated polypeptide; (f) at least one crosslink between a side chain of a glutamic acid residue of the polypeptide and a side chain of a lysine residue of a second isolated polypeptide; (g) at least one crosslink between the carboxyl group at the C-terminus of the polypeptide and the amino group of the N-terminus of a second isolated polypeptide; and (h) at least one crosslink between the carboxyl group at the C-terminus of the polypeptide and a side chain of a lysine residue of a second isolated polypeptide.

[0285] In a further exemplary embodiment, the resulting composition includes (a) at least one crosslink between a side chain of an aspartic acid residue of the polypeptide and a side chain of a lysine residue of the polypeptide; (b) at least one crosslink between a side chain of a glutamic acid residue of the polypeptide and a side chain of a lysine residue of the polypeptide; (e) at least one crosslink between a side chain of an aspartic acid residue of the polypeptide and a side chain of a lysine residue of a second isolated polypeptide; and (f) at least one crosslink between a side chain of a glutamic acid residue of the polypeptide and a side chain of a lysine residue of a second isolated polypeptide.

[0286] In a preferred embodiment, the chemical crosslinking agent includes formaldehyde, more preferably, an agent including formaldehyde in the absence of lysine. Glycine or other appropriate compound with a primary amine can be used as the quencher in crosslinking reactions. Accordingly, in another preferred embodiment, the chemical agent includes formaldehyde and use of glycine.

[0287] In yet another preferred embodiment, the chemical crosslinking agent includes EDC and NHS. As is known in the art, NHS may be included in EDC coupling protocols. However, the inventors surprisingly discovered that NHS may facilitate in further decreasing cytotoxicity of the mutant C. difficile toxin, as compared to the corresponding wild-type toxin, as compared to a genetically mutated toxin, and as compared to a genetically mutated toxin that has been chemically crosslinked by EDC. See, for example, Example 22 described in WIPO Patent Application WO/2012/143902, U.S. Pat. No. 9,187,536, and WIPO Patent Application WO/2014/060898, which are each incorporated by reference herein in their respective entireties. Accordingly, without being bound by mechanism or theory, a mutant toxin polypeptide having a beta-alanine moiety linked to a side chain of at least one lysine residue of the polypeptide (e.g., resulting from a reaction of the mutant toxin polypeptide, EDC, and NHS) may facilitate in further decreasing cytotoxicity of the mutant toxin, as compared to, for example, a C. difficile toxin (wild-type or mutant) wherein a beta-alanine moiety is absent.

[0288] Use of EDC and/or NHS may also include use of glycine or other appropriate compound with a primary amine as the quencher. Any compound having a primary amine may be used as a quencher, such as, for example glycine methyl ester and alanine. In a preferred embodiment, the quencher compound is a non-polymeric hydrophilic primary amine. Examples of a non-polymeric hydrophilic primary amine include, for example, amino sugars, amino alcohols, and amino polyols. Specific examples of a non-polymeric hydrophilic primary amine include glycine, ethanolamine, glucamine, amine functionalized polyethylene glycol, and amine functionalized ethylene glycol oligomers. In one embodiment, the chemical crosslinking agent does not include formaldehyde. In one embodiment, the chemical crosslinking agent does not include formalin.

[0289] In one aspect, the invention relates to a mutant C. difficile toxin, i.e., a polypeptide, having at least one amino acid side chain chemically modified by EDC and a non-polymeric hydrophilic primary amine, preferably glycine. The resulting glycine adducts (e.g., from a reaction of triple mutant toxins treated with EDC, NHS, and quenched with glycine) may facilitate in decreasing cytotoxicity of the mutant toxin as compared to the corresponding wild-type toxin.

[0290] In one embodiment, when a mutant C. difficile toxin, i.e., a polypeptide, is chemically modified by EDC and glycine, the polypeptide includes at least one modification when the polypeptide is modified by EDC (e.g., at least one of any of the (a)-(h) modifications described above), and at least one of the following exemplary modifications: (i) a glycine moiety linked to the carboxyl group at the C-terminus of the polypeptide; (j) a glycine moiety linked to a side chain of at least one aspartic acid residue of the polypeptide; and (k) a glycine moiety linked to a side chain of at least one glutamic acid residue of the polypeptide.

[0291] In one embodiment, at least one amino acid of the mutant C. difficile TcdA, i.e., the polypeptide, is chemically crosslinked and/or at least one amino acid of the mutant C. difficile TcdB, i.e., a polypeptide, is chemically crosslinked. Any of the mutant toxins, i.e., polypeptides, described herein may be chemically crosslinked. In another embodiment, at least one amino acid of the polypeptide having SEQ ID NO: 4, SEQ ID NO: 6, SEQ ID NO: 7, and/or SEQ ID NO: 8 is chemically crosslinked.

[0292] In one embodiment, at least one amino acid residue of a polypeptide having the amino acid sequence of any of SEQ ID NOs: 1 through SEQ ID NO: 840 is crosslinked. For example, in one embodiment, at least one amino acid residue of a polypeptide having the amino acid sequence set forth in any one of SEQ ID NOs: 1-8, 15, 17, 19, 21, 23, 25, 28-35, 82-761, and 762-840 is crosslinked.

[0293] In another embodiment, at least one amino acid residue of a polypeptide having the amino acid sequence of any of SEQ ID NOs: 762 through SEQ ID NO: 800 includes a modification as described above, e.g., any of the (a)-(k) modifications, such as (a) at least one crosslink between a side chain of an aspartic acid residue of the polypeptide and a side chain of a lysine residue of the polypeptide. In another embodiment, at least one amino acid residue of a polypeptide having the amino acid sequence of any of SEQ ID NOs: 801 through SEQ ID NO: 840 includes a modification as described above, e.g., any of the (a)-(k) modifications, such as (a) at least one crosslink between a side chain of an aspartic acid residue of the polypeptide and a side chain of a lysine residue of the polypeptide.

[0294] For example, the at least one amino acid may be chemically crosslinked by an agent that includes a carbodiimide, such as EDC. Carbodiimides may form a covalent bond between free carboxyl (e.g., from the side chains of aspartic acid and/or glutamic acid) and amino groups (e.g., in the side chain of lysine residues) to form stable amide bonds.

[0295] As another example, the at least one amino acid may be chemically crosslinked by an agent that includes NHS. NHS ester-activated crosslinkers may react with primary amines (e.g., at the N-terminus of each polypeptide chain and/or in the side chain of lysine residues) to yield an amide bond.

[0296] In another embodiment, the at least one amino acid may be chemically crosslinked by an agent that includes EDC and NHS. For example, in one embodiment, the invention relates to an isolated polypeptide having the amino acid sequence set forth in SEQ ID NO: 4, wherein the methionine residue at position 1 is optionally not present, wherein the polypeptide includes at least one amino acid side chain chemically modified by EDC and NHS. In another embodiment, the invention relates to an isolated polypeptide having the amino acid sequence set forth in SEQ ID NO: 6, wherein the methionine residue at position 1 is optionally not present, wherein the polypeptide includes at least one amino acid side chain chemically modified by EDC and NHS. In yet another embodiment, the invention relates to an isolated polypeptide having the amino acid sequence set forth in SEQ ID NO: 84, SEQ ID NO: 86, SEQ ID NO: 83, SEQ ID NO: 85, SEQ ID NO: 7, or SEQ ID NO: 8. The polypeptide is modified by contacting the polypeptide with EDC and NHS.

[0297] When a mutant C. difficile toxin, i.e., a polypeptide, is chemically modified by (e.g., by contacting) EDC and NHS, in one embodiment, the polypeptide includes at least one modification when the polypeptide is modified by EDC (e.g., at least one of any of the (a)-(h) modifications described above), and (l) a beta-alanine moiety linked to a side chain of at least one lysine residue of the polypeptide.

[0298] In another aspect, the invention relates to a mutant C. difficile toxin, i.e., a polypeptide, wherein the polypeptide includes at least one amino acid side chain chemically modified by EDC, NHS, and a non-polymeric hydrophilic primary amine, preferably glycine. In one embodiment, the polypeptide includes at least one modification when the polypeptide is modified by EDC (e.g., at least one of any of the (a)-(h) modifications described above), at least one modification when the polypeptide is modified by glycine (e.g., at least one of any of the (i)-(k) modifications described above), and (l) a beta-alanine moiety linked to a side chain of at least one lysine residue of the polypeptide.

[0299] In one aspect, the invention relates to a mutant C. difficile toxin, i.e., a polypeptide, wherein a side chain of at least one lysine residue of the polypeptide is linked to a beta-alanine moiety. In one embodiment, a side chain of a second lysine residue of the polypeptide is linked to a side chain of an aspartic acid residue and/or to a side chain of a glutamic acid residue. The “second” lysine residue of the polypeptide includes a lysine residue of the polypeptide that is not linked to a beta-alanine moiety. The side chain of an aspartic acid and/or the side chain of a glutamic acid to which the second lysine residue is linked may be that of the polypeptide to form an intra-molecular crosslink, or that of a second polypeptide to form an inter-molecular crosslink. In another embodiment, a side chain of at least one aspartic acid residue and/or a side chain of at least one glutamic acid residue of the polypeptide is linked to a glycine moiety. The aspartic acid residue and/or the glutamic acid residue that is linked to a glycine moiety is not also linked to a lysine residue.

[0300] In another aspect, the invention relates to a mutant C. difficile toxin, i.e., a polypeptide, wherein at least one amino acid side chain of a wild-type C. difficile toxin is chemically modified. In one embodiment, at least one amino acid side chain of a wild-type C. difficile toxin A and/or at least one amino acid side chain of a wild-type C. difficile toxin B is chemically modified by EDC. For example, in one embodiment, TcdA (SEQ ID NO: 1) and/or TcdB (SEQ ID NO: 2) is chemically modified by EDC. In another embodiment, the wild-type toxin is chemically modified by EDC and NHS. In one embodiment, the mutant toxin, i.e., polypeptide, includes a chemically modified wild-type toxin A, wherein the wild-type toxin A is any one described in Table 1. In another embodiment, the mutant toxin, i.e., polypeptide, includes a chemically modified wild-type toxin B, wherein the wild-type toxin B is any one described in Table 2.

TABLE 1
Wild-type C. difficile Strains

| C. difficile Strain ID | Toxin A, SEQ ID NO: |
|---|---|
| 2004013 | SEQ ID NO: 87 |
| 2004111 | SEQ ID NO: 88 |
| 2004118 | SEQ ID NO: 89 |
| 2004205 | SEQ ID NO: 90 |
| 2004206 | SEQ ID NO: 91 |
| 2005022 | SEQ ID NO: 92 |
| 2005088 | SEQ ID NO: 93 |
| 2005283 | SEQ ID NO: 94 |
| 2005325 | SEQ ID NO: 95 |
| 2005359 | SEQ ID NO: 96 |
| 2006017 | SEQ ID NO: 97 |
| 2006376 | N/A |
| 2007070 | SEQ ID NO: 98 |
| 2007217 | SEQ ID NO: 99 |
| 2007302 | SEQ ID NO: 100 |
| 2007816 | SEQ ID NO: 101 |
| 2007838 | SEQ ID NO: 102 |
| 2007858 | SEQ ID NO: 103 |
| 2007886 | SEQ ID NO: 104 |
| 2008222 | SEQ ID NO: 105 |
| 2009078 | SEQ ID NO: 106 |
| 2009087 | SEQ ID NO: 107 |
| 2009141 | SEQ ID NO: 108 |
| 2009292 | SEQ ID NO: 109 |
| 001 | SEQ ID NO: 148 |
| 002 | SEQ ID NO: 149 |
| 003 | SEQ ID NO: 150 |
| 012 (004) | SEQ ID NO: 151 |
| 014 | SEQ ID NO: 134 |
| 015 | SEQ ID NO: 135 |
| 017 | |
| 020 | SEQ ID NO: 136 |
| 023 | SEQ ID NO: 137 |
| 027 | SEQ ID NO: 138 |
| 029 | SEQ ID NO: 139 |
| 046 | SEQ ID NO: 140 |
| 053 | SEQ ID NO: 168 |
| 059 | SEQ ID NO: 178 |
| 070 | SEQ ID NO: 152 |
| 075 | SEQ ID NO: 153 |
| 077 | SEQ ID NO: 154 |
| 078 | SEQ ID NO: 169 |
| 081 | SEQ ID NO: 155 |
| 087 | SEQ ID NO: 170 |
| 095 | SEQ ID NO: 171 |
| 106 | SEQ ID NO: 180 |
| 117 | SEQ ID NO: 156 |
| 126 | SEQ ID NO: 172 |
| 131 | SEQ ID NO: 157 |
| SE844 | SEQ ID NO: 196 |
| 12087 | SEQ ID NO: 197 |
| K14 | SEQ ID NO: 198 |
| BI6 | SEQ ID NO: 199 |
| BI17 | SEQ ID NO: 200 |
| CH6230 | SEQ ID NO: 201 |
| SE881 | SEQ ID NO: 202 |

TABLE 2
Wild-type C. difficile Strains

| C. difficile Strain ID | Toxin B, SEQ ID NO: |
|---|---|
| 2004013 | SEQ ID NO: 110 |
| 2004111 | SEQ ID NO: 111 |
| 2004118 | SEQ ID NO: 112 |
| 2004205 | SEQ ID NO: 113 |
| 2004206 | SEQ ID NO: 114 |
| 2005022 | SEQ ID NO: 115 |
| 2005088 | SEQ ID NO: 116 |
| 2005283 | SEQ ID NO: 117 |
| 2005325 | SEQ ID NO: 118 |
| 2005359 | SEQ ID NO: 119 |
| 2006017 | SEQ ID NO: 120 |
| 2006376 | SEQ ID NO: 121 |
| 2007070 | SEQ ID NO: 122 |
| 2007217 | SEQ ID NO: 123 |
| 2007302 | SEQ ID NO: 124 |
| 2007816 | SEQ ID NO: 125 |
| 2007838 | SEQ ID NO: 126 |
| 2007858 | SEQ ID NO: 127 |
| 2007886 | SEQ ID NO: 128 |
| 2008222 | SEQ ID NO: 129 |
| 2009078 | SEQ ID NO: 130 |
| 2009087 | SEQ ID NO: 131 |
| 2009141 | SEQ ID NO: 132 |
| 2009292 | SEQ ID NO: 133 |
| 001 | SEQ ID NO: 158 |
| 002 | SEQ ID NO: 159 |
| 003 | SEQ ID NO: 160 |
| 012 (004) | SEQ ID NO: 161 |
| 014 | SEQ ID NO: 141 |
| 015 | SEQ ID NO: 142 |
| 017 | SEQ ID NO: 182 |
| 020 | SEQ ID NO: 143 |
| 023 | SEQ ID NO: 144 |
| 027 | SEQ ID NO: 145 |
| 029 | SEQ ID NO: 146 |
| 046 | SEQ ID NO: 147 |
| 053 | SEQ ID NO: 173 |
| 059 | SEQ ID NO: 179 |
| 070 | SEQ ID NO: 162 |
| 075 | SEQ ID NO: 163 |
| 077 | SEQ ID NO: 164 |
| 078 | SEQ ID NO: 174 |
| 081 | SEQ ID NO: 165 |
| 087 | SEQ ID NO: 175 |
| 095 | SEQ ID NO: 176 |
| 106 | SEQ ID NO: 181 |
| 117 | SEQ ID NO: 166 |
| 126 | SEQ ID NO: 177 |
| 131 | SEQ ID NO: 167 |

[0301] As yet another example of a chemically crosslinked mutant C. difficile toxin, i.e., a polypeptide, the at least one amino acid may be chemically crosslinked by an agent that includes formaldehyde. Formaldehyde may react with the amino group of an N-terminal amino acid residue and the side-chains of arginine, cysteine, histidine, and lysine. Formaldehyde and glycine may form a Schiff-base adduct, which may attach to primary N-terminal amino groups, arginine, and tyrosine residues, and to a lesser degree asparagine, glutamine, histidine, and tryptophan residues.

[0302] A chemical crosslinking agent is said to reduce cytotoxicity of a toxin if the treated toxin has less toxicity (e.g., about 100%, 99%, 95%, 90%, 80%, 75%, 60%, 50%, 25%, or 10% less toxicity) than untreated toxin under identical conditions, as measured, for example, by an in vitro cytotoxicity assay, or by animal toxicity.

[0303] Preferably, the chemical crosslinking agent reduces cytotoxicity of the mutant C. difficile toxin by at least about a 2-log₁₀ reduction, more preferably about a 3-logᵢₙ reduction, and most preferably about a 4-log₁₀ or more, relative to the mutant toxin under identical conditions but in the absence of the chemical crosslinking agent. As compared to the wild-type toxin, the chemical crosslinking agent preferably reduces cytotoxicity of the mutant toxin by at least about a 5-log₁₀ reduction, about a 6-log₁₀ reduction, about a 7-log₁₀ reduction, about an 8-log₁₀ reduction, or more.

[0304] In another preferred embodiment, the chemically inactivated mutant C. difficile toxin, i.e., a polypeptide, exhibits EC₅₀ value of greater than or at least about 50 μg/ml, 100 μg/ml, 200 μg/ml, 300 μg/ml, 400 μg/ml, 500 μg/ml, 600 μg/ml, 700 μg/ml, 800 μg/ml, 900 μg/ml, 1000 μg/ml or greater, as measured by, for example, an in vitro cytotoxicity assay, such as one described herein.

[0305] Reaction conditions for contacting the mutant toxin with the chemical crosslinking agent are within the scope of expertise of one skilled in the art, and the conditions may vary depending on the agent used. However, the inventors surprisingly discovered optimal reaction conditions for contacting a mutant C. difficile toxin, i.e., a polypeptide, with a chemical crosslinking agent, while retaining functional epitopes and decreasing cytotoxicity of the mutant toxin, as compared to the corresponding wild-type toxin.

[0306] Preferably, the reaction conditions are selected for contacting a mutant toxin with the crosslinking agent, wherein the mutant toxin has a minimum concentration of about 0.5, 0.75, 1.0, 1.25, 1.5, 1.75, 2.0 mg/ml to a maximum of about 3.0, 2.5, 2.0, 1.5, or 1.25 mg/ml. Any minimum value may be combined with any maximum value to define a range of suitable concentrations of a mutant toxin for the reaction. Most preferably, the mutant toxin has a concentration of about 1.0-1.25 mg/ml for the reaction.

[0307] In one embodiment, the agent used in the reaction has a minimum concentration of about 1 mM, 2 mM, 3 mM, 4 mM, 5 mM, 10 mM, 15 mM, 20 mM, 30 mM, 40 mM, or 50 mM, and a maximum concentration of about 100 mM, 90 mM, 80 mM, 70 mM, 60 mM, or 50 mM. Any minimum value may be combined with any maximum value to define a range of suitable concentrations of the chemical agent for the reaction.

[0308] In a preferred embodiment wherein the agent includes formaldehyde, the concentration used is preferably any concentration between about 2 mM to 80 mM, most preferably about 40 mM. In another preferred embodiment wherein the agent includes EDC, the concentration used is preferably any concentration between about 1.3 mM to about 13 mM, more preferably about 2 mM to 3 mM, most preferably about 2.6 mM. In one embodiment, the concentration of EDC is at most 5 g/L, 4 g/L, 3 g/L, 2.5 g/L, 2 g/L, 1.5 g/L, 1.0 g/L, 0.5 g/L based on the total reaction volume, preferably at most 1 g/L, more preferably at most 0.5 g/L.

[0309] Exemplary reaction times in which the mutant toxin is contacted with the chemical crosslinking agent include a minimum of about 0.5, 1, 2, 3, 4, 5, 6, 12, 24, 36, 48, or 60 hours, and a maximum of about 14 days, 12 days, 10 days, 7 days, 5 days, 3 days, 2 days, 1 day, or 12 hours, 11, 10, 9, 8, 7, 6, 5, 4, 3, 2, or 1 hour. Any minimum value may be combined with any maximum value to define a range of suitable reaction times.

[0310] In a preferred embodiment, the step of contacting the mutant toxin with the chemical crosslinking agent occurs for a period of time that is sufficient to reduce cytotoxicity of the mutant C. difficile toxin to an EC₅₀ value of at least about 1000 μg/ml in a suitable human cell, e.g., IMR-90 cells, in a standard in vitro cytotoxicity assay, as compared to an identical mutant toxin in the absence of the crosslinking agent. More preferably, the reaction step is carried out for a time that is at least twice as long, and most preferably at least three times as long or more, as the period of time sufficient to reduce the cytotoxicity of the mutant toxin to an EC₅₀ value of at least about 1000 μg/ml in a suitable human cell. In one embodiment, the reaction time does not exceed about 168 hours (or 7 days).

[0311] For example, in one embodiment wherein the agent includes formaldehyde, the mutant toxin is preferably contacted with the agent for about 12 hours, which was shown to be an exemplary period of time that was sufficient to reduce cytotoxicity of the mutant C. difficile toxin to an EC₅₀ value of at least about 1000 μg/ml in a suitable human cell, e.g., IMR-90 cells, in a standard in vitro cytotoxicity assay, as compared to an identical mutant toxin in the absence of the crosslinking agent. In a more preferred embodiment, the reaction is carried out for about 48 hours, which is at least about three times as long as a sufficient period of time for the reaction. In such an embodiment, the reaction time is preferably not greater than about 72 hours.

[0312] In another embodiment wherein the agent includes EDC, the mutant toxin is preferably contacted with the agent for about 0.5 hours, more preferably at least about 1 hour, or most preferably about 2 hours. In one embodiment, the mutant toxin is contacted with EDC for at most about 5 hours, preferably at most about 3 hours, more preferably at most about 2 hours. In such an embodiment, the reaction time is preferably not greater than about 6 hours.

[0313] Exemplary pH at which the mutant toxin is contacted with the chemical crosslinking agent include a minimum of about pH 5.5, 6.0, 6.5, 7.0, or 7.5, and a maximum of about pH 8.5, 8.0, 7.5, 7.0, or 6.5. Any minimum value may be combined with any maximum value to define a range of suitable pH. Preferably, the reaction occurs at pH 6.5 to 7.5, preferably at pH 7.0.

[0314] Exemplary temperatures at which the mutant toxin is contacted with the chemical crosslinking agent include a minimum of about 2° C., 4° C., 10° C., 20° C., 25° C., or 37° C., and a maximum temperature of about 40° C., 37° C., 30° C., 27° C., 25° C., or 20° C. Any minimum value may be combined with any maximum value to define a range of suitable reaction temperature. Preferably, the reaction occurs at about 20° C. to 30° C., most preferably at about 25° C.

[0315] The immunogenic compositions described above may include one mutant C. difficile toxin (A or B), i.e., polypeptides. Accordingly, the immunogenic compositions can occupy separate vials (e.g., a separate vial for a composition including mutant C. difficile toxin A and a separate vial for a composition including mutant C. difficile toxin B) in the preparation or kit. The immunogenic compositions may be intended for simultaneous, sequential, or separate use.

[0316] In another embodiment, the immunogenic compositions described above may include both mutant C. difficile toxins (A and B), i.e., polypeptides. Any combination of mutant C. difficile toxin A and mutant C. difficile toxin B described may be combined for an immunogenic composition. Accordingly, the immunogenic compositions can be combined in a single vial (e.g., a single vial containing both a composition including mutant C. difficile TcdA and a composition including mutant C. difficile TcdB). Preferably, the immunogenic compositions include a mutant C. difficile TcdA and a mutant C. difficile TcdB, i.e., polypeptides.

[0317] For example, in one embodiment, the immunogenic composition includes SEQ ID NO: 4 and SEQ ID NO: 6, wherein at least one amino acid of each of SEQ ID NO: 4 and SEQ ID NO: 6 is chemically crosslinked. In one embodiment, the immunogenic composition includes SEQ ID NO: 4 and SEQ ID NO: 6, wherein at least one amino acid of each of SEQ ID NO: 4 and SEQ ID NO: 6 is chemically crosslinked by EDC and NHS. In another embodiment, the immunogenic composition includes a mutant C. difficile toxin A, which includes SEQ ID NO: 4 or SEQ ID NO: 7, and a mutant C. difficile toxin B, which comprises SEQ ID NO: 6 or SEQ ID NO: 8, wherein at least one amino acid of each of the mutant C. difficile toxins is chemically crosslinked.

[0318] In another embodiment, the immunogenic composition includes any sequence selected from SEQ ID NO: 4, SEQ ID NO: 84, and SEQ ID NO: 83, and any sequence selected from SEQ ID NO: 6, SEQ ID NO: 86, and SEQ ID NO: 85. In another embodiment, the immunogenic composition includes SEQ ID NO: 84 and an immunogenic composition including SEQ ID NO: 86. In another embodiment, the immunogenic composition includes SEQ ID NO: 83 and an immunogenic composition including SEQ ID NO: 85. In another embodiment, the immunogenic composition includes SEQ ID NO: 84, SEQ ID NO: 83, SEQ ID NO: 86, and SEQ ID NO: 85.

[0319] In another embodiment, the immunogenic composition includes a polypeptide having any one sequence selected from SEQ ID NO: 1 to SEQ ID NO: 840, and a second polypeptide having any one sequence selected from SEQ ID NO: 1 to SEQ ID NO: 840, wherein the polypeptide has been contacted with a chemical crosslinker, such as, for example, formaldehyde or EDC, as described herein. For example, in one embodiment, the immunogenic composition includes a first polypeptide having the amino acid sequence set forth in any one of SEQ ID NOs: 1-8, 15, 17, 19, 21, 23, 25, 28-35, 82-840 and a second polypeptide having the amino acid sequence set forth in any one of SEQ ID NOs: 1-8, 15, 17, 19, 21, 23, 25, 28-35, 82-840, wherein the first polypeptide and the second polypeptide has been contacted with a chemical crosslinker, such as, for example, formaldehyde or EDC, as described herein.

[0320] In certain embodiments, it is preferred that the compositions described herein exhibit immunogenic properties (e.g., inducing a detectable and/or neutralizing and/or protective immune response) following appropriate administration to a subject. The presence of neutralizing and/or protective immune response may be demonstrated as described above and/or by showing that infection by a pathogen (e.g., C. difficile) is affected (e.g., decreased) in individuals (e.g., human being or other animal) to whom the materials described herein have been administered as compared to individuals to whom the materials have not been administered. For instance, one or more test subjects (e.g., human or non-human) may be administered by any suitable route and schedule a composition described herein, and then after a suitable amount of time (e.g., about 1, 2, 3, 4, 5, 6, 7, 8, 9, or 10 weeks) challenged by a pathogenic organism. The animal(s) may be monitored for immune function (e.g., antibody production, T cell activity) following administration and/or challenge. Sera may be analyzed for total antibody response or for expression of particular subtypes using, for example, an antibody ELISA and/or a pathogen neutralization assay. T cell activity may be measured by, for example, measuring IFN-γ production after re-stimulation with the antigen. Statistical analysis (e.g., Fishers exact test, Wilcoxon test, Mann-Whitney Test) may then be performed on data to determine whether the effectiveness of the material in affecting the immune response.

[0321] The C. difficile toxoids A and/or B as described herein may be combined with one or more pharmaceutically acceptable carriers to provide a composition prior to administration to a host. A pharmaceutically acceptable carrier is a material that is not biologically or otherwise undesirable, e.g., the material may be administered to a subject, without causing any undesirable biological effects or interacting in a deleterious manner with any of the other components of the pharmaceutical composition in which it is contained. The carrier would naturally be selected to minimize any degradation of the active ingredient and to minimize any adverse side effects in the subject, as would be well known to one of skill in the art. Suitable pharmaceutical carriers and their formulations are described in, for example, Remington's: The Science and Practice of Pharmacy, 27⁴′ Edition, David B. Troy, ed., Lippicott Williams & Wilkins (2005), and may be appropriate Typically, an appropriate amount of a pharmaceutically-acceptable salt is used in the formulation to render the formulation isotonic. Examples of the pharmaceutically-acceptable carriers include, but are not limited to, sterile water, saline, buffered solutions like Ringer's solution, and dextrose solution. The pH of the solution is generally from about 5 to about 8 or from about 7 to about 7.5. Other carriers include sustained-release preparations such as semipermeable matrices of solid hydrophobic polymers containing polypeptides or fragments thereof. Matrices may be in the form of shaped articles, e.g., films, liposomes or microparticles. It will be apparent to those persons skilled in the art that certain carriers may be more preferable depending upon, for instance, the route of administration and concentration of composition being administered. Carriers are those suitable for administration to humans or other subjects.

[0322] As referred to above, an immunological composition is typically one that comprises C. difficile antigen(s) and, upon administration to a host (e.g., an animal), induces or enhances an immune response directed against the antigen (e.g., C. difficile). Such responses may include the generation of antibodies (e.g., through the stimulation of B cells) or a T cell-based response (e.g., a cytolytic response), as described above, which may be protective and/or neutralizing. A protective or neutralizing immune response may be one that is detrimental to the infectious organism corresponding to the antigen (e.g., from which the antigen was derived) and beneficial to the host (e.g., by reducing or preventing infection). As used herein, protective or neutralizing antibodies and/or cellular responses may be reactive with the C. difficile antigen(s) described here, especially when administered in an effective amount and/or schedule. Those antibodies and/or cellular responses may reduce or inhibit the severity, time, and/or lethality of C. difficile infection when tested in animals. As shown in the examples, the compositions described herein may be used to induce an immune response against C. difficile. An immunological composition that, upon administration to a host, results in a therapeutic (e.g., typically administered during an active infection) and/or protective (e.g., typically administered before or after an active infection) and/or neutralizing immune response, may be considered a vaccine.

[0323] In one aspect, the present invention relates to a composition that includes any of the compositions described herein (such as, e.g., compositions including a mutant C. difficile toxin, immunogenic compositions, antibodies and/or antigen binding fragments thereof described herein), formulated together with a pharmaceutically acceptable carrier.

[0324] In one embodiment, the composition induces an immune response. In a preferred embodiment, use of the composition reduces the incidence of a first primary episode of a C. difficile infection. The incidence may be reduced after the first administration of the composition, after the second administration of the composition, and/or after the third administration of the composition, as compared to the incidence prior to a first administration of the composition. In another embodiment, use of the composition reduces the incidence of recurrent C. difficile infection. The incidence of recurrent infection may be reduced after the first administration of the composition, after the second administration of the composition, and/or after the third administration of the composition.

[0325] In another embodiment, use of the composition reduces the severity of a C. difficile infection. For example, the duration of an episode of a C. difficile infection may be reduced after the first administration of the composition, after the second administration of the composition, and/or after the third administration of the composition, as compared to the incidence prior to a first administration of the composition. An episode of a C. difficile infection may include, for example, at least two days of passing at least three unformed stools and/or a need for antibiotic treatment for C. difficile infection. The duration of an episode of a C. difficile infection may be considered reduced if the patient has had at least two days without passage of at least three or more unformed stools and/or there is no further need for antibiotic treatment for C. difficile infection.

[0326] In some embodiments, methods for preventing, ameliorating, reducing the risk of and/or treating (e.g., affecting) infection by C. difficile are also provided. Methods for treating one or more disease conditions caused by or involving C. difficile in a subject comprising administering to the subject at least one or more effective doses of a composition described herein (e.g., comprising C. difficile antigens, e.g., toxoid A, toxoid B). The antigens may be administered in a dosage amount of about 1 to about 300 μg (e.g., about any of 1, 2, 3, 4, 5, 6, 7, 8, 9, 10, 1 5, 20, 30, 35, 40, 45, 50, 55, 60, 65, 70, 75, 80, 85, 90, 95, 100, 1 10, 120, 130, 140, 150, 160, 170, 180, 190, 200, 210, 220, 230, 240, 250, 260, 270, 280, 290 and/or 300 μg). The antigens may be administered more than once in the same or different dosage amounts. In certain embodiments, the C. difficile antigens may be administered to the subject by the same or different suitable route(s) one, two, three, four, five, six, seven, eight, nine, ten, or more times. When multiple doses are administered, the doses may comprise about the same or different type and/or amount of C. difficile antigens in each dose. The doses may also be separated in time from one another by the same or different intervals. For instance, the doses may be separated by about any of 6, 12, 24, 36, 48, 60, 72, 84, or 96 hours, seven days, 14 days, 21 days, 30 days, 40 days, 50 days, 60 days, 70 days, 80 days, 90 days, 100 days, 1 10 days, 120 days, 130 days, 140 days, 150 days, 160 days, 170 days, 180 days, 190 days, 200 days, one week, two weeks, three weeks, one month, two months, three months, four months, five months, six months, seven months, eight months, nine months, 10 months, 1 1 months, 12 months, 1.5 years, 2 years, 3 years, 4 years, 5 years, or any time period before, after, and/or between any of these time periods. In some embodiments, the C. difficile antigens may be administered alone or in conjunction with other agents (e.g., antibiotics) Such other agents may be administered simultaneously (or about simultaneously) with the same or different C. difficile antigens, or at a different time and/or frequency. Other embodiments of such methods may also be appropriate as could be readily determined by one of ordinary skill in the art.

[0327] Also provided are methods for immunizing a subject (such as a human being) by administering thereto any such compositions. In some embodiments, the methods may comprise administering to the subject an immunogenic composition (e.g., a vaccine) comprising an effective amount (e.g., at least about 40 to about 500, such about 50 to about 100 μg) of C. difficile toxoid A and toxoid B (combined w/w) at an effective toxoid A:B ratio (e.g., 3:1, 3:2, 1:1 by weight (w/w)), and with a sufficient purity (e.g., at least 90% (w/w)), using one or more administrations (e.g., at least three times, each dose being suitably separated from one another (e.g., at least about 7 days)). An effective toxoid A:B ratio is any ratio that may be included in a composition and induce an effective immune response against C. difficile toxin A and/or toxin B.

[0328] In one embodiment, the method may comprise first, second and third administrations wherein the second administration is at least 7 days after the first administration and the third administration is at least about 30 days and/or at least about 180 days after the first and/or second administration.

[0329] In some embodiments, the methods may enhance and/or induce an existing immune response in a human being previously exposed to C. difficile (e.g., a seropositive human being, an anamnestic immune response).

[0330] In one embodiment, the human has had an unplanned hospitalization within the 12 months prior to the first administration of the composition. In another embodiment, the human has had a skilled nursing facility (a residential institution that provides professional nursing care and rehabilitation services, usually following discharge from hospital) stay within the 12 months prior to the first administration of the composition. In another embodiment, the human has had a nursing home (e.g., a residential institution that provides professional nursing care and rehabilitation services, usually following discharge from a hospital) stay within the 12 months prior to the first administration of the composition. In another embodiment, the human has had two or more emergency room visits within the 12 months prior to the first administration of the composition. In another embodiment, the human has had 10 or more out-patient visits (primary and/or secondary care visits but excluding pharmacy and mental health visits) within the 12 months prior to the first administration of the composition.

[0331] In another embodiment, the human has been administered systemic antibiotic use within the 12 weeks prior to the first administration of the composition. In another embodiment, the human has a significant co-morbidity or contact with health care systems within the 12 months prior to the first administration of the composition. In another embodiment, the human has had 1 in-patient hospitalization nights within the 12 months prior to the first administration of the composition. In another embodiment, the human has had 2 emergency room visits within the 12 months prior to the first administration of the composition. In another embodiment, the human has had 10 out-patient visits within the 12 months prior to the first administration of the composition. In another embodiment, the human has a residence in a skilled nursing facility within the 12 months prior to the first administration of the composition. In another embodiment, the human has a residence in a nursing home within the 12 months prior to the first administration of the composition. In another embodiment, the human has an in-patient hospitalization nights scheduled 37 days after randomization within the 12 months prior to the first administration of the composition. In another embodiment, the human has received systemic antibiotics at any time within the previous 12 weeks prior to the first administration of the composition.

[0332] In certain embodiments, the human works at or has contact with any one of the following facilities within the 12 months prior to the first administration of the composition: a hospital, skilled nursing facility (a residential institution that provides professional nursing care and rehabilitation services, usually following discharge from hospital), a nursing home (e.g., a residential institution that provides professional nursing care and rehabilitation services, usually following discharge from a hospital), emergency room, and out-patient facility (primary and/or secondary care visits but excluding pharmacy and mental health visits).

[0333] In certain embodiments, human being(s) may have had, in the 12 month period before the first administration, at least one or two hospital stays, each lasting at least about 24, 48 or 72 hours or more, and/or had received systemic (not topical) antibiotics; and/or, is anticipated to have an in-patient hospitalization for a planned surgical procedure within about 60 days of the first administration. In some embodiments, the anticipated/impending hospital stay/hospitalization may be planned to be for about 24, 48 to 72 hours or more and may be for a surgery involving at least one of the kidney/bladder/urinary system, musculoskeletal system, respiratory system, circulatory system, and central nervous system.

[0334] It is preferred that the immune response elicited by these methods is sufficient to prevent and/or ameliorate and/or reduce the risk of symptomatic C. difficile infection. In certain embodiments, the method may comprise administering the immunogenic composition to a human subject at risk for a symptomatic infection that is at least about 40, 50 or 65, 70, 75, 80, or 85 years of age. In some embodiments, the method may comprise administering the composition to each individual of a group aged between about 40 and about 65 years old and/or between about 65 and about 75 years old. In some embodiments, the method may induce about a two- to four-fold enhancement of an antibody-based immune response against C. difficile toxin A and/or toxin B in about any of 80, 85, 90, 95 or 100% of a population of individuals considered seropositive before the first administration as measured by, e.g., ELISA and/or TNA. In some embodiments, the method may induce about a two- to four-fold enhancement of an antibody-based immune response against C. difficile toxin A and/or toxin B in about any of 20, 25, 30, 35, 40, 45, or 50% of a population of individuals considered seronegative before administration of the composition, as measured by, e.g., ELISA and/or TNA 14 days after the first administration (e.g., following administration at days 0, seven and 30). In some embodiments, the method may induce about a two- to four-fold enhancement of an antibody-based immune response against C. difficile toxin A and/or toxin B in about any of 30, 35, 40, 45, 50, 55, 60, 65, 70, 75, or 80% of a population of individuals considered seronegative before administration of the composition, as measured by, e.g., ELISA and/or TNA 60 days after the first administration (e.g., following administration at days 0, seven and 30). In some embodiments, the individuals in such populations are from about 40 to about 65 years old. In some embodiments, the individuals in such populations are from about 50 to 75 years old or about 50 years old to about 65 years old. In some embodiments, this enhancement is observed about 30 days after the first administration (at day 0), typically follows a second administration at about day 7, and is typically observed before the third administration (at, e.g., about day 30 or day 180). In some embodiments, the immune response may be detectable against toxin A and/or toxin B for up to about 30 months (e.g., about 1000 days) after the first, second and/or third administration in a multiple regimen administration protocol. In some embodiments, administration of a composition described herein to a human subject at day 0 (first administration), about day 7 (second administration) and about day 30 (third administration) enhances or induces an immune response against C. difficile toxin A and/or toxin B for up to about 30 months, or about 1000 days as measured by, e.g., ELISA and/or TNA, preferably by a cytoxicity assay. In some embodiments, the level of the immune response may be about at least as high on about day 1000 following the first administration as on about day 14 following the first administration of a three dose administration regimen, as measured by, e.g., ELISA and/or TNA, preferably by a cytoxicity assay. In some embodiments, the level of the immune response may be about at least as high on about any of days 100, 200, 300, 400, 500, 600, 700, 800, 900 and 1000 following the first administration as on about day 14 following the first administration as measured by, e.g., ELISA and/or TNA, preferably by a cytoxicity assay. In some embodiments, the immune response may be about two- to eight-fold above baseline (e.g., antitoxin A and/or toxin B antibody levels at day 0, before the first administration, as measured by e.g., ELISA and/or TNA. In some embodiments, the immune response may be from about 2.5 to about 6.8-fold above baseline as measured by e.g., ELISA and/or TNA, preferably by a cytoxicity assay. In some embodiments, the immune response in seropositive individuals (e.g., non-naive) is increased from baseline by a factor of about three at about day 7; about 10 to about 70 at about day 14; about 30 to about 200 at about day 30; and about 100 to about 200 at about day 60, as measured by ELISA for toxins A and/or B (e.g., following administration at days 0, 7 and 30). In some embodiments, the immune response in seropositive individuals (e.g., non-naive) is increased from baseline by a factor of about three at about day 7; about 10 to about 100 at about day 14; about 1 5 to about 1 30 at about day 30; and about 100 to about 130 at about day 60, as measured by TNA for toxins A and/or B (e.g., following administration at days 0, seven and 30). In some embodiments, the immune response in seronegative individuals (e.g., naive) is increased from baseline by a factor of about two at about day 14; about five to about 10 at about day 30; and about 25 to about 60 at about day 60, as measured by ELISA for toxins A and/or B (e.g., following administration at days 0, seven and 30). In some embodiments, the immune response in seronegative individuals (e.g., naive) is increased from baseline by a factor of about two to about three at about day 14; about two to about five at about day 30; and about five to about 40 at about day 60, as measured by TNA for toxins A and/or B (e.g., following administration at days 0, 7 and 30). In some embodiments, the immune responses described herein are detected in individuals considered either seropositive or seronegative at day 0 (e.g., before the first administration). In some embodiments, such immune response is detected for both C. difficile toxin A and toxin B as measured by, e.g., ELISA and/or TNA, preferably by a cytoxicity assay. Methods (e.g., in vitro or in vivo) for producing such C. difficile antigens (e.g., toxoids A and/or B), and compositions comprising the same, are also provided. Such methods may include, for example, any of those available and/or known to those of ordinary skill in the art, and/or the methods described in WIPO Patent Application WO/2012/143902, U.S. Pat. No. 9,187,536, and WIPO Patent Application WO/2014/060898, which are each incorporated by reference herein in their respective entireties.

[0335] As used herein, a subject or a host is meant to be an individual. The subject can include domesticated animals, such as cats and dogs, livestock (e.g., cattle, horses, pigs, sheep, and goats), laboratory animals (e.g., mice, rabbits, rats, guinea pigs) and birds. In one aspect, the subject is a mammal such as a primate or a human.

### Composition and Vaccine

[0336] In one embodiment, the composition is an immunogenic composition. In one embodiment, the composition is an immunogenic composition for a human. In another embodiment, the composition is a vaccine. A “vaccine” refers to a composition that includes an antigen, which contains at least one epitope that induces an immune response that is specific for that antigen. The vaccine may be administered directly into the subject by subcutaneous, oral, oronasal, or intranasal routes of administration. Preferably, the vaccine is administered intramuscularly. In one embodiment, the composition is a human vaccine. In one embodiment, the composition is an immunogenic composition against C. difficile.

[0337] In certain embodiments, the compositions may further comprise one or more C. difficile antigens, one or more pharmaceutically acceptable carriers and/or one or more adjuvants (e.g., aluminum salt, emulsion, cationic liposome, anionic polymer, Toll-like receptor agonist, CpG and a combination thereof).

[0338] In one embodiment, the composition, which may be a vaccine, may be provided as a lyophilized formulation that may be reconstituted at the clinical site with diluent, and mixed with either adjuvant (e.g., an aluminum adjuvant such as aluminum phosphate or aluminum hydroxide or water for injection (WFI), when specified.

[0339] In one embodiment, the composition includes a pharmaceutically acceptable carrier(s), which refer to any solvents, dispersion media, stabilizers, diluents, and/or buffers that are physiologically suitable. Exemplary stabilizers include carbohydrates, such as sorbitol, mannitol, starch, dextran, sucrose, trehalose, lactose, and/or glucose; inert proteins, such as albumin and/or casein; and/or other large, slowly metabolized macromolecules, such as polysaccharides such as chitosan, polylactic acids, polyglycolic acids and copolymers (such as latex functionalized SEPHAROSE™ agarose, agarose, cellulose, etc.), amino acids, polymeric amino acids, amino acid copolymers, and lipid aggregates (such as oil droplets or liposomes). Additionally, these carriers may function as immunostimulating agents (i.e., adjuvants).

[0340] Preferably, the composition includes trehalose. Preferred amounts of trehalose (% by weight) include from a minimum of about 1%, 2%, 3%, or 4% to a maximum of about 10%, 9%, 8%, 7%, 6%, or 5%. Any minimum value can be combined with any maximum value to define a suitable range. In one embodiment, the composition includes about 3%-6% trehalose, most preferably, 4.5% trehalose, for example, per 0.5 mL dose.

[0341] Examples of suitable diluents include distilled water, saline, physiological phosphate-buffered saline, glycerol, alcohol (such as ethanol), Ringer's solutions, dextrose solution, Hanks' balanced salt solutions, and/or a lyophilization excipient. The diluent may be, for example, any pharmaceutically acceptable diluent (e.g., 20 mM Sodium Citrate, 5% Sucrose, and 0.016% Formaldehyde; 10 nM Citrate, 4% Sucrose, 0.008% Formaldehyde, 0.57% Sodium Chloride). In a preferred embodiment, the composition includes 10 mM Tris, 4.5%, Trehalose, 0.01% Polysorbate 80 (PS80), pH 7.4

[0342] Exemplary buffers include phosphate (such as potassium phosphate, sodium phosphate); acetate (such as sodium acetate); succinate (such as sodium succinate); glycine; histidine; carbonate, Tris (tris(hydroxymethyl)aminomethane), and/or bicarbonate (such as ammonium bicarbonate) buffers. Preferably, the composition includes tris buffer. Preferred amounts of tris buffer include from a minimum of about 1 mM, 5 mM, 6 mM, 7 mM, 8 mM, 9 mM, 10 mM to a maximum of about 100 mM, 50 mM, 20 mM, 19 mM, 18 mM, 17 mM, 16 mM, 15 mM, 14 mM, 13 mM, 12 mM, or 11 mM. Any minimum value can be combined with any maximum value to define a suitable range. In one embodiment, the composition includes about 8 mM to 12 mM tris buffer, most preferably, 10 mM tris buffer, for example, per 0.5 mL dose.

[0343] In another preferred embodiment, the composition includes histidine buffer. Preferred amounts of histidine buffer include from a minimum of about 1 mM, 5 mM, 6 mM, 7 mM, 8 mM, 9 mM, 10 mM to a maximum of about 100 mM, 50 mM, 20 mM, 19 mM, 18 mM, 17 mM, 16 mM, 15 mM, 14 mM, 13 mM, 12 mM, or 11 mM. Any minimum value can be combined with any maximum value to define a suitable range. In one embodiment, the composition includes about 8 mM to 12 mM histidine buffer, most preferably, 10 mM histidine buffer, for example, per 0.5 mL dose.

[0344] In yet another preferred embodiment, the composition includes phosphate buffer. Preferred amounts of phosphate buffer include from a minimum of about 1 mM, 5 mM, 6 mM, 7 mM, 8 mM, 9 mM, 10 mM to a maximum of about 100 mM, 50 mM, 20 mM, 19 mM, 18 mM, 17 mM, 16 mM, 15 mM, 14 mM, 13 mM, 12 mM, or 11 mM. Any minimum value can be combined with any maximum value to define a suitable range. In one embodiment, the composition includes about 8 mM to 12 mM phosphate buffer, most preferably, 10 mM phosphate buffer, for example, per 0.5 mL dose.

[0345] The pH of the buffer will generally be chosen to stabilize the active material of choice, and can be ascertainable by those in the art by known methods. Preferably, the pH of the buffer will be in the range of physiological pH. Thus, preferred pH ranges are from about 3 to about 8; more preferably, from about 6.0 to about 8.0; yet more preferably, from about 6.5 to about 7.5; and most preferably, at about 7.0 to about 7.2.

[0346] In another embodiment, the compositions described herein may include an adjuvant, as described below. Preferred adjuvants augment the intrinsic immune response to an immunogen without causing conformational changes in the immunogen that may affect the qualitative form of the immune response. Exemplary adjuvants include 3 De-O-acylated monophosphoryl lipid A (MPL™) (see GB 2220211 (GSK)); an aluminum hydroxide gel such as ALHYDROGEL™ (Brenntag Biosector, Denmark); aluminum salts (such as aluminum hydroxide, aluminum phosphate, aluminum sulfate), which may be used with or without an immunostimulating agent such as MPL or 3-DMP, QS-21, polymeric or monomeric amino acids such as polyglutamic acid or polylysine. Yet another exemplary adjuvant is an immunostimulatory oligonucleotide such as a CpG oligonucleotide (see, e.g., WO 1998/040100, WO2010/067262), or a saponin and an immunostimulatory oligonucleotide, such as a CpG oligonucleotide (see, e.g., WO 00/062800). In a preferred embodiment, the adjuvant is a CpG oligonucleotide, most preferably a CpG oligodeoxynucleotides (CpG ODN). Preferred CpG ODN are of the B Class that preferentially activate B cells. In aspects of the invention, the CpG ODN has the nucleic acid sequence 5′ T*C*G*T*C*G*T*T*T*T*T*C*G*G*T*G*C*T*T*T*T 3′ (SEQ ID NO: 48) wherein * indicates a phosphorothioate linkage. The CpG ODN of this sequence is known as CpG 24555, which is described in WO2010/067262. In a preferred embodiment, CpG 24555 is used together with an aluminium hydroxide salt such as ALHYDROGEL. A further class of exemplary adjuvants include saponin adjuvants, such as STIMULON™ (QS-21, which is a triterpene glycoside or saponin, Aquila, Framingham, Mass.) or particles generated therefrom such as ISCOMs (immune stimulating complexes) and ISCOMATRIX adjuvant. Accordingly, the compositions of the present invention may be delivered in the form of ISCOMs, ISCOMS containing CTB, liposomes or encapsulated in compounds such as acrylates or poly(DL-lactide-co-glycoside) to form microspheres of a size suited to adsorption. Typically, the term “ISCOM” refers to immunogenic complexes formed between glycosides, such as triterpenoid saponins (particularly Quil A), and antigens which contain a hydrophobic region. In a preferred embodiment, the adjuvant is an ISCOMATRIX adjuvant. Other exemplary adjuvants include RC-529, GM-CSF and Complete Freund's Adjuvant (CFA) and Incomplete Freund's Adjuvant (IFA). Yet another class of exemplary adjuvants is glycolipid analogues including N-glycosylamides, N-glycosylureas and N-glycosylcarbamates, each of which is substituted in the sugar residue by an amino acid. Optionally, the pharmaceutical composition includes two or more different adjuvants. Preferred combinations of adjuvants include any combination of adjuvants including, for example, at least two of the following adjuvants: alum, MPL, QS-21, ISCOMATRIX, CpG, and ALHYDROGEL. An exemplary combination of adjuvants includes a combination of CpG and ALHYDROGEL.

[0347] The adjuvant may comprise, for instance, a suitable concentration (e.g., about any of 800-1600 μg/mL) of an adjuvant, such, as an adjuvant comprising aluminum (e.g., aluminum hydroxide or aluminum phosphate) in WFI. For instance, the adjuvant (e.g., 800-1600 g/mL aluminum hydroxide in 0.57% Sodium Chloride) may be used as the diluent to reconstitute the lyophilized formulation. WFI may be used to dilute the lyophilized vaccine for the unadjuvanted formulations. The final dosing solution may comprise, for instance, composition/vaccine, diluent and adjuvant.

[0348] Alternatively, in one embodiment, the composition is administered to the mammal in the absence of an adjuvant. That is, the composition does not comprise an adjuvant.

[0349] In some embodiments, the composition includes a surfactant. Any surfactant is suitable, whether it is amphoteric, non-ionic, cationic or anionic. Exemplary surfactants include the polyoxyethylene sorbitan esters surfactants (e.g., TWEEN 0), such as polysorbate 20 and/or polysorbate 80; polyoxyethylene fatty ethers derived from lauryl, cetyl, stearyl and oleyl alcohols (known as BRIJ surfactants), such as triethyleneglycol monolauryl ether (BRIJ 30); TRITON X 100, or t-octylphenoxypolyethoxyethanol; and sorbitan esters (commonly known as the SPANs), such as sorbitan trioleate (SPAN 85) and sorbitan monolaurate, and combinations thereof. Preferred surfactants include polysorbate 80 (polyoxyethylene sorbitan monooleate).

[0350] Polysorbate 80 (PS-80) is a non-ionic surfactant. In one embodiment, the composition includes a PS-80 concentration ranging from 0.0005% to 1%. For example, the PS-80 concentration in the composition may be at least 0.0005%, 0.005%, 0.01%, 0.02%, 0.03%, 0.04%, 0.05%, 0.06%, 0.07%, 0.08%, 0.09%, 0.10%, 0.2%, 0.3%, 0.4%, 0.5%, 0.6%, 0.7%, 0.8%, 0.9%, 1%, or 1.1% PS-80. In one embodiment, the PS-80 concentration in the composition may be at most 2.0%, 1.9%, 1.8%, 1.7%, 1.6%, 1.5%, 1.4%, 1.3%, 1.2%, 1.1%, 1.0%, 0.9%, 0.8%, or 0.7% PS-80. Any minimum value may be combined with any maximum value described herein to define a range. Preferably, the composition comprises 0.01% PS-80.

[0351] In an exemplary embodiment, the immunogenic composition includes trehalose and phosphate 80. In another exemplary embodiment, the immunogenic composition includes tris buffer and polysorbate 80. In another exemplary embodiment, the immunogenic composition includes histidine buffer and polysorbate 80. In yet another exemplary embodiment, the immunogenic composition includes phosphate buffer and polysorbate 80.

[0352] In one exemplary embodiment, the immunogenic composition includes trehalose, tris buffer and polysorbate 80. In another exemplary embodiment, the immunogenic composition includes trehalose, histidine buffer and polysorbate 80. In yet another exemplary embodiment, the immunogenic composition includes trehalose, phosphate buffer and polysorbate 80.

[0353] In some embodiments, the pharmaceutical composition further includes formaldehyde. For example, in a preferred embodiment, a pharmaceutical composition that further includes formaldehyde has an immunogenic composition, wherein the mutant C. difficile toxin of the immunogenic composition has been contacted with a chemical crosslinking agent that includes formaldehyde. The amount of formaldehyde present in the pharmaceutical composition may vary from a minimum of about 0.001%, 0.002%, 0.003%, 0.004%, 0.005%, 0.006%, 0.007%, 0.008%, 0.009%, 0.010%, 0.013%, or 0.015%, to a maximum of about 0.020%, 0.019%, 0.018%, 0.017% 0.016%, 0.015%, 0.014%, 0.013%, 0.012% 0.011% or 0.010%. Any minimum value can be combined with any maximum value to define a suitable range. In one embodiment, the pharmaceutical composition includes about 0.010% formaldehyde.

[0354] In some alternative embodiments, the pharmaceutical compositions described herein do not include formaldehyde. For example, in a preferred embodiment, a pharmaceutical composition that does not include formaldehyde has an immunogenic composition, wherein at least one amino acid of the mutant C. difficile toxin is chemically crosslinked by an agent that includes EDC. More preferably, in such an embodiment, the mutant C. difficile toxin has not been contacted with a chemical crosslinking agent that includes formaldehyde. As another exemplary embodiment, a pharmaceutical composition that is in a lyophilized form does not include formaldehyde.

[0355] Also provided herein are kits for administering the C. difficile antigens. In one embodiment, one or more of C. difficile antigens may form part of and/or be provided as a kit for administration to a subject. Instructions for administering the C. difficile antigens may also be provided by the kit. Compositions comprising C. difficile antigens as described herein may be included in a kit (e.g., a vaccine kit). For example, the kit may comprise a first container containing a composition described herein in dried or lyophilized form and a second container containing an aqueous solution for reconstituting the composition. The kit may optionally include the device for administration of the reconstituted liquid form of the composition (e.g., hypodermic syringe, microneedle array) and/or instructions for use. The device for administration may be supplied pre-filled with an aqueous solution for reconstituting the composition.

[0356] The volume of each delivered dose of study drug (vaccine or placebo) may be about 0.5 mL. The volume of each delivered dose of the composition disclosed herein may be about 0.2, 0.3, 0.4, 0.5, 0.6, 0.7; 0.8, 0.9 or 1 mL. The volume of each delivered dose of the composition disclosed herein may be about 0.4, 0.5, 0.6 ml. The volume of each delivered dose of the composition disclosed herein may be about 0.5 mL. The volume of each delivered dose of the composition disclosed herein may be about 1 mL. Formulations may be administered by any suitable route (e.g., subcutaneously, intravenously, intramuscularly, intraperitoneally, intradermally, intranodally, intranasally, orally).

### Toxin Neutralizing Activity

[0357] Immune response induced by administering the composition to a human may be determined using a toxin neutralization assay (TNA), ELISA, or more preferably, a cytotoxicity assay, such as that described in WIPO Patent Application WO/2012/143902, U.S. Pat. No. 9,187,536, and WIPO Patent Application WO/2014/060898, which are each incorporated by reference herein in their respective entireties.

[0358] The in vitro cytotoxicity assay is a key safety assay developed for testing of any potential residual cytotoxicity in drug substance material. Measurement of any potential residual cytotoxicity in toxoid A is accomplished using an IMR-90 cell-based assay. The wild-type C. difficile toxin A exhibits potent in vitro cytotoxicity, with small amounts of the toxin being sufficient to cause various effects on mammalian cells such as cell rounding (cytopathic effect or CPE) and lack of metabolic activity (as measured by ATP levels). The CPE assay is conducted by incubating toxoid material with the IMR90 cells in culture at 500 mcg/mL at 37° C., and evaluating for cell rounding 24 hours later. The CPE assay requires a subjective visual assessment of CPE by trained analysts and thus cannot be easily validated. The cytotoxicity release assay has been developed based on measurement of the amount of luminescence signal generated from ATP, which is proportional to the number of metabolically active cells following treatment with either toxoid A or wild-type toxin. The results are expressed as EC₅₀, which is defined as the amount of toxin or toxoid that causes a 50% reduction in ATP levels as measured in relative light units. The toxoid is tested at a concentration of 100 mcg/mL. This method was chosen for release and stability (limited time points) testing because it is more robust, objective, and suitable for GMP testing than an alternative cytopathogenic effect (CPE) assay. The cytotoxicity assay is run only on the toxoid because it can be tested at a higher concentration as compared to the drug product material without matrix interference. This ensures that the measurement is made at the most concentrated stage during the C. difficile vaccine production cycle. In addition, the cytotoxicity assay will be conducted on stability to monitor any potential reversion to toxicity.

[0359] The in vitro cytotoxicity assay is a key safety assay developed for testing of any potential residual cytotoxicity in drug substance material. Measurement of any potential residual cytotoxicity in toxoid B is accomplished using an IMR-90 cell-based assay. The wild-type C. difficile toxin B exhibits potent in vitro cytotoxicity, with small amounts of the toxin being sufficient to cause various effects on mammalian cells such as cell rounding (cytopathic effect or CPE) and lack of metabolic activity (as measured by ATP levels). The CPE assay is conducted by incubating DS material with the IMR90 cells in culture at 500 mcg/mL at 37° C., and evaluating for cell rounding 24 hours later. The CPE assay requires a subjective visual assessment of CPE by trained analysts and thus cannot be easily validated. The cytotoxicity release assay has been developed based on measurement of the amount of luminescence signal generated from ATP, which is proportional to the number of metabolically active cells following treatment with either toxoid B or wild-type toxin B. The results are expressed as EC₅₀, which is defined as the amount of toxin or toxoid that causes a 50% reduction in ATP levels as measured in relative light units. The maximum concentration of toxoid that was originally tested in this assay was 200 mcg/mL. However, method performance over time suggested that an upper concentration of only 100 mcg/mL can be consistently supported. This method was chosen for release and stability (limited time points) testing because it is more robust, objective, and suitable for GMP testing than an alternative CPE assay. The cytotoxicity assay is run only on the toxoid B drug substance material because it can be tested at a higher concentration as compared to the drug product material without matrix interference. This ensures that the measurement is made at the most concentrated stage during the C. difficile vaccine production cycle. In addition, the cytotoxicity assay will be conducted on stability to monitor any potential reversion to toxicity.

[0360] To qualify the 50% neutralization titer assay for clinical use, provide further robustness to the assay, and assure consistent long-term performance in clinical development, a reference standard and appropriate controls were added to the assay, thereby permitting the read out of a neutralization titer as neutralization units/mL defined by the reference standard. Prior to analysis of the current study, serum samples from vaccinated humans were used to demonstrate a linear relationship between 50% neutralization titers and neutralization units/mL when performing the neutralization assay. Based on these correlation studies, “protective” neutralization threshold values were calculated and used to analyze the clinical data in this study.

[0361] In one embodiment, the TNA is an automated and sensitive assay based on luminescence readout. Neutralization titers of test samples are calculated based on a Reference standard. In one embodiment, the assay LLOQ for Txd A is 158.0 U/ml; Txd B=249.5 U/ml.

[0362] For the immunogenicity analyses, the “protective” thresholds for antitoxin A- and antitoxin B-neutralizing antibody responses were 219 and 2586 neutralization units/mL, respectively. Several of the immunogenicity endpoints for Study B5091009 were assessed based upon these “protective” thresholds.

[0363] As used herein, unless expressly defined otherwise, the “specified threshold” value is defined as 219 neutralization units/mL for toxin A and 2586 neutralization units/mL for toxin B.

[0364] In one embodiment, the immune response induced in the human is neutralizing against a C. difficile strain that expresses a toxin A having an amino acid sequence that has at least 80%, 81%, 82%, 83%, 84%, 85%, 86%, 87%, 88%, 89%, 90%, 91%, 92%, 93%, 94%, 95%, 96%, 97%, 98%, 99%, or 100% identity to the toxoid A of the composition.

[0365] In another embodiment, the immune response induced in the human is neutralizing against a C. difficile strain that expresses a toxin B including an amino acid sequence that has at least 80%, 81%, 82%, 83%, 84%, 85%, 86%, 87%, 88%, 89%, 90%, 91%, 92%, 93%, 94%, 95%, 96%, 97%, 98%, 99%, or 100% identity to the toxoid B of the composition.

[0366] The usefulness (e.g., immunogenicity) of any of the materials (e.g., compositions) and/or methods described herein may be assayed by any of the variety of methods known to those of skill in the art. Any one or more of the assays described herein, or any other one or more suitable assays, may be used to determine the suitability of any of the materials described herein for an intended purpose. It is to be understood that these methods are exemplary and non-limiting; other assays may also be suitable. For instance, the compositions described herein typically induce and/or enhance the production of antibodies against C. difficile upon administration to a subject. Such antibodies may be detected in the subject using any of the methods available to those of ordinary skill in the art. For instance, as described in the Examples section, serum may be obtained from a subject and tested by ELISA to detect immunoglobulin type G (IgG) antibodies to C. difficile toxin A and/or toxin B (e.g., “primary immunogenicity data”). Antibodies present in test sera may be reacted with toxin A or B antigens adsorbed to individual wells of a microtiter plate. The amount of antibody bound to the antigen coated wells may be determined using a colorimetric substrate reaction after binding of a secondary anti-IgG (e.g., anti-human IgG) antibody-enzyme conjugate. Substrate for the enzyme is then typically added that causes colorimetric change that was directly proportional to the antibody bound to the antigen. The concentration of antibodies in serum may be derived by extrapolation from a standard curve, which was generated from multiple dilutions of a reference standard serum with defined IgG units (ELISA unit (EU)/mL)). A toxin neutralization assay (TNA) may also be used to quantitate neutralizing antibodies to C. difficile toxin. In this assay, serial diluted serum may be incubated with a fixed amount of C. difficile toxin A or B. Test cells (e.g., Vero cells) may then then added and serum-toxin-cell mixture incubated under appropriate conditions (e.g., 37° C. for 6 days). The ability of the sera to neutralize the cytotoxic effect of the C. difficile toxin may be determined by and correlated to the viability of the cells. The assay utilizes the accumulation of acid metabolites in closed culture wells as an indication of normal cell respiration. In cells exposed to toxin, metabolism and CO₂ production is reduced; consequently, the pH rises (e.g., to 7.4 or higher) as indicated by the phenol red pH indicator in the cell culture medium. At this pH, the medium appears red. Cell controls, or cells exposed to toxin which have been neutralized by antibody, however, metabolize and produce CO₂ in normal amounts; as a result, the pH is maintained (e.g., at 7.0 or below) and at this pH, the medium appears yellow. Therefore, C. difficile toxin neutralizing antibodies correlate with the ability of the serum to neutralize the metabolic effects of C. difficile toxin on cells as evidenced by their ability to maintain a certain pH (e.g., of 7.0 or lower). The color change of the media may be measured (e.g., at 562 nm to 630 nm) using a plate reader to further calculate the antitoxin neutralizing antibody titer at 50% inhibition of the C. difficile toxin-mediated cytotoxicity. In one embodiment, the composition induces a toxin neutralizing antibody titer that is at least greater than 1-fold, such as, for example, at least 1.01-fold, 1.1-fold, 1.5-fold, 2-fold, 3-fold, 4-fold, 5-fold, 6-fold, 7-fold, 8-fold, 9-fold, 10-fold, 11-fold, 12-fold, 13-fold, 14-fold, 15-fold, 16-fold, 32-fold, or higher in the human after receiving a dose of the composition than a toxin neutralizing antibody titer in the human prior to receiving said dose, when measured under identical conditions in a toxin neutralization assay.

### Titers

[0367] In one embodiment, the composition induces an increase in toxin neutralizing antibody titer in the human, as compared to the toxin neutralizing antibody titer in the human prior to administration of a dose of the composition, when measured under identical conditions in, for example, a cytotoxicity assay. In one embodiment, the increase in toxin neutralizing titer is compared to the toxin neutralizing titer in the human before administration of the first dose of the composition, as compared to the toxin neutralizing titer in the human prior to administration of the first dose of the composition, when measured under identical conditions in, for example, a cytotoxicity assay. In another embodiment, the increase in titer is observed after a second dose of the composition, as compared to the toxin neutralizing titer in the human prior to administration of the first dose of the composition, when measured under identical conditions in, for example, a cytotoxicity assay. In another embodiment, the increase in toxin neutralizing titer is observed after a third dose of the composition, as compared to the toxin neutralizing titer in the human prior to administration of the first dose of the composition, when measured under identical conditions in, for example, a cytotoxicity assay. In another embodiment, the increase in titer is observed after a second dose of the composition, as compared to the toxin neutralizing titer in the human prior to administration of the second dose of the composition, when measured under identical conditions in, for example, a cytotoxicity assay. In another embodiment, the increase in toxin neutralizing titer is observed after a third dose of the composition, as compared to the toxin neutralizing titer in the human prior to administration of the third dose of the composition, when measured under identical conditions in, for example, a cytotoxicity assay.

[0368] In one embodiment, the composition induces a toxin neutralizing titer in the human after administration of a dose, wherein the toxin neutralizing titer is at least greater than 1-fold higher than the toxin neutralizing titer in the human prior to administration of the dose, when measured under identical conditions in, for example, a cytotoxicity assay. For example, the toxin neutralizing titer may be at least 1.01-fold, 1.1-fold, 1.5-fold, 2-fold, 3-fold, 4-fold, 5-fold, 6-fold, 7-fold, 8-fold, 9-fold, 10-fold, 11-fold, 12-fold, 13-fold, 14-fold, 15-fold, 16-fold, 32-fold, or 64-fold higher in the human after receiving a dose of the composition, as compared to the toxin neutralizing titer in the human prior to administration of the dose, when measured under identical conditions in, for example, a cytotoxicity assay.

[0369] In one embodiment, a “responder” refers to a human, wherein the composition induces a toxin neutralizing titer in the human after administration of a dose, wherein the toxin neutralizing titer is at least greater than 1-fold higher than the toxin neutralizing titer in the human prior to administration of the dose. In a preferred embodiment, the responder achieves at least a 4-fold rise in toxin neutralizing titer, as compared to a toxin neutralizing titer in the human prior to administration of the dose. Such a responder may be referred to as having a protective titer.

[0370] In one embodiment, the composition induces a toxin neutralizing titer in the human after receiving the first dose that is at least 2-fold higher than the toxin neutralizing titer in the human prior to receiving the first dose (e.g., higher than the toxin neutralizing titer in the human in the absence of the first dose), when measured under identical conditions in the cytotoxicity assay. In one embodiment, the composition induces a toxin neutralizing titer in the human that is at least 4-fold higher than the toxin neutralizing titer in the human prior to receiving the first dose, when measured under identical conditions in a cytotoxicity assay. In one embodiment, the composition induces a toxin neutralizing titer in the human that is at least 8-fold higher than the toxin neutralizing titer in the human prior to receiving the first dose, when measured under identical conditions in a cytotoxicity assay.

[0371] In one embodiment, the human has, for example, a toxin neutralizing titer equal to or greater than the lower limit of quantitation (LLOQ) of the cytotoxicity assay after administration of the first dose of the composition. In another embodiment, the human has, for example, a cytotoxicity assay titer equal to or greater than the LLOQ of the cytotoxicity assay after administration of the second dose of the composition. In another embodiment, the human has, for example, a toxin neutralizing titer equal to or greater than the LLOQ of the cytotoxicity assay after administration of the third dose of the composition.

[0372] In one embodiment, a primary immunogenicity endpoint is assessed based upon the ability of the vaccine to induce toxin A- and toxin B-specific neutralizing antibody levels greater than or equal to a specified threshold estimate for each C. difficile vaccine toxoid. For example, specified thresholds derived from a Phase 2 efficacy study demonstrating that passive administration of 2 mAbs against toxin A and toxin B were associated with protection against CDI may be used. In addition to showing efficacy of anti-toxin mAbs against recurrent CDI, the Phase 2 efficacy study also suggested that anti-toxin A- and anti-toxin B-neutralizing mAb levels above a threshold of 10 μg/mL (“protective” threshold level) were associated with protection against CDI recurrence.

[0373] In one embodiment, to translate the toxin A and toxin B “protective” threshold from the Phase 2 efficacy study into 50% neutralization titers elicited by the vaccine candidate, advantage is taken of the observations that (1) the same cytotoxicity assay is used to measure toxin neutralization and (2) the inhibitory mAb concentration that neutralizes 50% of the toxins (IC₅₀ [50% inhibitory concentration]) had been published (IC₅₀ values for the toxin A and toxin B mAbs are 100 ng/mL and 15 ng/mL, respectively). In one embodiment, the “protective” 50% neutralization titer for each anti-toxin antibody is, therefore, calculated to be the antibody concentration at the protective threshold of 10 μg/mL divided by the respective mAb IC₅₀.

[0374] For example, to qualify the 50% neutralization titer assay for clinical use, provide further robustness to the assay, and assure consistent long-term performance in clinical development, a reference standard and appropriate controls were added to the assay, thereby permitting the read out of a neutralization titer as neutralization units/mL defined by the reference standard. Prior to analysis of the current study, serum samples from vaccinated humans were used to demonstrate a linear relationship between 50% neutralization titers and neutralization units/mL when performing the neutralization assay. Based on these correlation studies, “protective” neutralization threshold values were calculated and used to analyze the clinical data in this study.

[0375] For the immunogenicity analyses, the “protective” thresholds for antitoxin A- and antitoxin B-neutralizing antibody responses were 219 and 2586 neutralization units/mL, respectively. Several of the immunogenicity endpoints for Study B5091009 were assessed based upon these “protective” thresholds.

[0376] In one embodiment, the “specified threshold” value is defined as 219 neutralization units/mL for toxin A and 2586 neutralization units/mL for toxin B.

[0377] Methods of Analysis. For any C. difficile toxin A- or toxin B-specific neutralizing antibody level that was below the lower limit of quantitation (LLOQ), the LOD, defined as 0.5×LLOQ, may be assigned. In one embodiment, the LLOQs for the toxin A- and toxin B-specific neutralization assays are 158.0 neutralization units/mL and 249.5 neutralization units/mL, respectively.

[0378] In one embodiment, if the toxin A-specific neutralizing antibody level is ≥LLOQ for toxin-A, the subject is considered seropositive for toxin A. If the toxin B-specific neutralizing antibody level is LLOQ for toxin B, the subject is considered seropositive for toxin B. Conversely, if an antibody level is <LLOQ, the subject was considered seronegative.

### Antibody or Antigen Binding Fragment Thereof

[0379] In one aspect, the invention relates to an antibody including the amino acid sequence set forth in SEQ ID NO: 841, or an antigen binding fragment thereof. In another aspect, the invention relates to compositions including the antibody or antigen binding fragment thereof and methods of using the antibody or antigen binding fragment thereof. In one embodiment, the antibody or antigen binding fragment thereof includes an amino acid sequence that is about 60%, 65%, 70%, 75%, 80%, 85%, 86%, 87%, 88%, 89%, 90%, 91%, 92%, 93%, 94%, 95%, 96%, 97%, 98%, 99%, or 100% identical to SEQ ID NO: 841.

[0380] In one embodiment, the antibody or binding fragment thereof has a neutralizing effect on C. difficile toxins. The antibody or binding fragment thereof can neutralize C. difficile toxin cytotoxicity in vitro, inhibit binding of C. difficile toxin to mammalian cells, and/or can neutralize C. difficile toxin enterotoxicity in vivo. The present invention also relates to isolated polynucleotides that include nucleic acid sequences encoding the antibody or binding fragment thereof. In addition, the present invention relates to use of compositions comprising any of the foregoing antibodies or binding fragments thereof to treat, prevent, decrease the risk of, decrease severity of, decrease occurrences of, and/or delay the outset of a C. difficile infection, C. difficile associated disease, syndrome, condition, symptom, and/or complication thereof in a mammal, as compared to a mammal to which the composition is not administered, as well as methods for preparing said compositions.

[0381] The antibody molecules can be full-length (e.g., an IgG1 or IgG4 antibody). The antibodies can be of the various isotypes, including: IgG (e.g., IgG1, IgG2, IgG3, IgG4), IgM, IgA1, IgA2, IgD, or IgE. In one preferred embodiment, the antibody is an IgG isotype, e.g., IgG1. In another preferred embodiment, the antibody is an IgE antibody.

[0382] In another embodiment, the antibody molecule includes an “antigen-binding fragment” or “binding fragment,” as used herein, which refers to a portion of an antibody that specifically binds to a toxin of C. difficile (e.g., toxin A). The binding fragment is, for example, a molecule in which one or more immunoglobulin chains is not full length, but which specifically binds to a toxin.

[0383] Examples of binding portions encompassed within the term “binding fragment” of an antibody include (i) a Fab fragment, a monovalent fragment consisting of the VL, VH, CL and CH1 domains; (ii) a F(ab′) 2 fragment, a bivalent fragment comprising two Fab fragments linked by a disulfide bridge at the hinge region; (iii) a Fd fragment consisting of the VH and CH1 domains; (iv) a Fv fragment consisting of the VL and VH domains of a single arm of an antibody, (v) a dAb fragment (Ward et al., Nature 341:544-546, 1989), which consists of a VH domain; and (vi) an isolated complementarity determining region (CDR) having sufficient framework to specifically bind, e.g., an antigen binding portion of a variable region.

[0384] As used herein, a “neutralizing antibody or binding fragment thereof refers to a respective antibody or binding fragment thereof that binds to a pathogen agent (e.g., a C. difficile TcdA or TcdB) and reduces the infectivity and/or an activity of the pathogen (e.g., reduces cytotoxicity) in a mammal and/or in cell culture, as compared to the pathogen under identical conditions in the absence of the neutralizing antibody or binding fragment thereof. In one embodiment, the neutralizing antibody or binding fragment thereof is capable of neutralizing at least about 70%, 75%, 80%, 85%, 90%, 95%, 99%, or more of a biological activity of the pathogen, as compared to the biological activity of the pathogen under identical conditions in the absence of the neutralizing antibody or binding fragment thereof.

[0385] As used herein, the term “anti-toxin antibody or binding fragment thereof refers to an antibody or binding fragment thereof that binds to the respective C. difficile toxin (e.g., a C. difficile toxin A or toxin B). For example, an anti-toxin A antibody or binding fragment thereof refers to an antibody or binding fragment thereof that binds to TcdA.

[0386] The anti-toxin antibody or binding fragment thereof can be administered in combination with other anti-C. difficile toxin antibodies (e.g., other monoclonal antibodies, polyclonal gamma-globulin) or a binding fragment thereof. Combinations that can be used include an anti-toxin A antibody or binding fragment thereof and an anti-toxin B antibody or binding fragment thereof.

[0387] It is understood that any of the inventive compositions, for example, an anti-toxin A and/or anti-toxin B antibody or binding fragment thereof, can be combined in different ratios or amounts for therapeutic effect. For example, the anti-toxin A and anti-toxin B antibody or respective binding fragment thereof can be present in a composition at a ratio in the range of 0.1:10 to 10:0.1, A:B. In another embodiment, the anti-toxin A and anti-toxin B antibody or respective binding fragment thereof can be present in a composition at a ratio in the range of 0.1:10 to 10:0.1, B:A.

### Methods and Administration

[0388] In one aspect, the invention relates to a method of inducing an immune response against C. difficile in a human. In another aspect, the invention relates to a method of vaccinating a human. In one embodiment, the method includes administering to the human at least one dose of the composition described above. In a preferred embodiment, the method includes administering to the human at most one dose of the composition described above. In another embodiment, the method includes administering to the human a first dose and a second dose of the composition described above.

[0389] In one embodiment, the second dose is administered about 6 months after the first dose. In one embodiment, the second dose is administered at least 20, 30, 50, 60, 100, 120, 160, 170, or 180 days after the first dose, and at most 250, 210, 200, or 190 days after the first dose. Any minimum value may be combined with any maximum value described herein to define a range.

[0390] In another embodiment, the second dose is administered about 30 days after the first dose. In another embodiment, the second dose is administered about 60 days after the first dose, such as, for example, in a 0, 2 month immunization schedule. In another embodiment, the second dose is administered about 180 days after the first dose, such as, for example, in a 0, 6 month immunization schedule. In yet another embodiment, the second dose is administered about 120 days after the first dose, such as, for example, in a 2, 6 month immunization schedule.

[0391] In one embodiment, the method includes administering to the human two doses of the composition and at most two doses. In one embodiment, the two doses are administered within a period of about 6 months after the first dose. In one embodiment, the method does not include further administration of a booster to the human. A “booster” as used herein refers to an additional administration of the composition to the human. Administering to the human at most two doses of the composition may be advantageous. Such advantages include, for example, facilitating a human to comply with a complete administration schedule and facilitating cost-effectiveness of the schedule.

[0392] In one embodiment, the first dose and the second dose are administered to the human over a period of about 5 days, 7 days, 14 days, 21, 25, 30, 40, 50, 60, 70, 80, 90, 100, 110, 120, 130, 140, 150, 160, 170, 180, 190, or 200 days, and most 400, 390, 380, 370, 365, 350, 340, 330, 320, 310, 300, 290, 280, 270, 260, 250, 240, 230, 220, 210, or 200 days after the first dose. In one embodiment, the second dose is administered to the human at least 8, 14, 21, 25, or 30 days and at most 100, 90, 80, 70, 60, 50, 45, 40, 35, or 30 days after administration of the first dose. For example, in one embodiment, the second dose is administered to the human at least 21 days and at most 40 days after administration of the first dose. Any minimum value may be combined with any maximum value described herein to define a range. Preferably, the first dose and second dose are administered to the human over a period of about 8 days. More preferably, the first dose and second dose are administered to the human over a period of about 30 days. Most preferably, the first dose and second dose are administered to the human over a period of at least about 30 days.

[0393] In one embodiment, the first dose and the second dose are administered to the human over a period of about 30 days. In another embodiment, the first dose and the second dose are administered to the human over a period of about 60 days. In another embodiment, the first dose and the second dose are administered to the human over a period of about 180 days.

[0394] In one embodiment, the method includes administering to the human three doses of the composition. In another embodiment, the method includes administering at most three doses of the composition. In one embodiment, the three doses are administered within a period of about 6 months after the first dose. In one embodiment, the method includes an administration of a booster dose to the human after the third dose. In another embodiment, the method does not include administration of a booster dose to the human after the third dose. In another embodiment, the method does not further include administering a fourth or booster dose of the composition to the human. In a further embodiment, at most three doses within a period of about 6 months are administered to the human.

[0395] In an exemplary embodiment, the second dose is administered about 30 days after the first dose, and the third dose is administered about 150 to 180 days after the second dose, such as, for example, in a 0, 1, 6 month immunization schedule. In another exemplary embodiment, the second dose is administered about 60 days after the first dose, and the third dose is administered about 120 days after the second dose, such as, for example, in a 0, 2, 6 month immunization schedule.

[0396] In one embodiment, the first dose, second dose, and third dose are administered to the human over a period of about 150, 160, 170, or 180 days, and at most 240, 210 200, or 190 days. Any minimum value may be combined with any maximum value described herein to define a range. Preferably, the first dose, second dose, and third dose is administered to the human over a period of about 180 days or 6 months. For example, the second dose may be administered to the human about 60 days after the first dose, and the third dose may be administered to the human about 120 days after the second dose. Accordingly, an exemplary schedule of administration includes administering a dose to the human at about months 0, 2, and 6.

[0397] As described above, multiple doses of the immunogenic composition may be administered to the human, and the number of days between each dose may vary. An advantage of the method includes, for example, flexibility for a human to comply with the administration schedules.

[0398] In one aspect, the invention relates to a method of inducing an immune response in a mammal (preferably a human) against C. difficile expressing a toxin having any one amino acid sequence of SEQ ID Nos: 762-800. In another aspect, the invention relates to a method of inducing an immune response in a mammal (preferably a human) against C. difficile expressing a toxin having any one amino acid sequence of SEQ ID Nos: 801-840. In one embodiment, the method includes administering to the human at least one dose of the composition described above. In a preferred embodiment, the method includes administering to the human at most one dose of the composition described herein. In another embodiment, the method includes administering to the human at most two doses of the composition described herein.

[0399] In one embodiment, the method includes administering to the human a composition that includes a first polypeptide comprising the amino acid sequence SEQ ID NO: 4, wherein the methionine at position 1 is not present, and a second polypeptide comprising the amino acid sequence SEQ ID NO: 6, wherein the methionine at position 1 is not present. In another embodiment, the first and the second polypeptide are further chemically inactivated by EDC and NHS, as described, for example, in Example 21 of WIPO Patent Application WO/2012/143902, U.S. Pat. No. 9,187,536, and WIPO Patent Application WO/2014/060898, WIPO Patent Application WO/2012/143902, U.S. Pat. No. 9,187,536, and WIPO Patent Application WO/2014/060898,

[0400] In one embodiment, the method includes administering to the human a composition that includes a polypeptide comprising any one of the amino acid sequences described in FIG. 7. In another embodiment, the method includes administering to the human a composition that includes a polypeptide comprising any one of the amino acid sequences described in FIG. 8. In another embodiment, the method includes administering to the human a composition that includes a first polypeptide comprising any one of the amino acid sequences described in FIG. 7; and a second polypeptide comprising any one of the amino acid sequences described in FIG. 8.

### Examples

[0401] The following Examples illustrate embodiments of the invention. Unless noted otherwise herein, reference is made in the following Examples to a “vaccine candidate,” “investigational C. difficile vaccine,” or “immunogenic composition” (also referred to as “PF-06425090”) that includes a mixture of genetically modified C. difficile toxoid A, i.e., polypeptide, (comprising SEQ ID NO: 4, wherein the initial methionine is not present) and genetically modified C. difficile toxoid B, i.e., polypeptide, (comprising SEQ ID NO: 6, wherein the initial methionine is not present) that were further chemically inactivated by 1-ethyl-3-(3-dimethylaminopropyl) carbodiimide) (EDC) and N-Hydroxysuccinimide (NHS) to eliminate residual cytotoxicity but retain native antigenic structure and generate a neutralizing antibody response, as described in Example 21 of WIPO Patent Application WO/2012/143902, U.S. Pat. No. 9,187,536, and WIPO Patent Application WO/2014/060898, WIPO Patent Application WO/2012/143902, U.S. Pat. No. 9,187,536, and WIPO Patent Application WO/2014/060898, which are each incorporated by reference herein in their respective entireties. Briefly, after purification, the genetic mutant toxins (SEQ ID NO: 4 and SEQ ID NO: 6) are inactivated for 2 hours at 25° C. using 0.5 mg EDC and 0.5 mg NHS per mg of purified genetic mutant toxin A and B (approximately 2.6 mM and 4.4 mM respectively). The reaction is quenched by the addition of glycine to a final concentration of 100 mM and the reactions incubate for an additional 2 hours at 25° C. The inactivation is carried out at pH 7.0±0.5 in 10 mM phosphate, 150 mM sodium chloride buffer. The inactivation period is set to exceed three times the period needed for reduction in the EC₅₀ in IMR90 cells to greater than 1000 ug/mL. After 2 hours, the biological activity is reduced 7 to 8 logo relative to the native toxin. Following the 4 hour incubation, the inactivated mutant toxin is exchanged into the final drug substance buffer by diafiltration. For example, using a 100 kD regenerated cellulose acetate ultrafiltration cassette, the inactivated toxin is concentrated to 1-2 mg/mL and buffer-exchanged. More specifically, the vaccine composition includes (a) a first polypeptide, which includes the amino acid sequence set forth in SEQ ID NO: 4, wherein the methionine residue at position 1 of SEQ ID NO: 4 is not present, wherein a side chain of a lysine residue of the first polypeptide is crosslinked to a beta-alanine moiety, and wherein the first polypeptide further includes a crosslink between a side chain of an aspartic acid residue of the first polypeptide and a glycine moiety, and a crosslink between a side chain of a glutamic acid residue of the first polypeptide and a glycine moiety; and (b) a second polypeptide, which includes the amino acid sequence set forth in SEQ ID NO: 6, wherein the methionine residue at position 1 of SEQ ID NO: 6 is not present, wherein a side chain of a lysine residue of the second polypeptide is crosslinked to a beta-alanine moiety, and wherein the second polypeptide further includes a crosslink between a side chain of an aspartic acid residue of the second polypeptide and a glycine moiety, and a crosslink between a side chain of a glutamic acid residue of the second polypeptide and a glycine moiety.

[0402] The investigational C. difficile vaccine is composed of 2 toxoids (A and B) in equal amounts. The vaccine was provided as a sterile lyophilized powder at dosage strengths of 100 μg and 200 μg of toxoids A and B combined per dose. The vaccine was prepared for injection by resuspending the lyophilized vaccine with the aluminum hydroxide diluent immediately before use. The aluminum hydroxide diluent was supplied as a 1-mg aluminum/mL (as aluminum hydroxide) liquid suspension.

[0403] More specifically, the theoretical molecular mass of the genetically modified toxin A (SEQ ID NO: 4), prior to chemical inactivation, is 307,968 Daltons (Da). This mass assumes des-Met on the N-terminus, all Cys in the reduced form and no additional posttranslational modifications. The theoretical molecular mass of the genetically modified toxin B (SEQ ID NO: 6), prior to chemical inactivation, is 269,461 Da. This mass assumes des-Met on the N-terminus, all Cys in the reduced form and no additional posttranslational modifications. The inherent biological activity of the toxin (glucosyltransferase activity and autocatalytic protease activity) is abrogated via site-directed mutagenesis and chemical inactivation with EDC/NHS.

[0404] Lyophilized Vaccine Drug Product Formulation. The C difficile vaccine drug product is presented as a sterile lyophilized powder with a 1:1 ratio of TxdA DS and TxdB DS in a dosage strength of 200 μg/dose (total dose for TxdA DS and TxdB DS). For Phase 3 a dose of 200 μg is being used. The drug product is supplied in a 2 mL, 13 mm Type I glass vial with a Flurotec coated stopper and aluminum overseal. The C difficile vaccine drug product vials should be stored at 2-8° C. The lyophilized drug product is reconstituted with an aluminum hydroxide diluent for a 0.5 mL IM injection. The reconstituted vaccine contains 0.017% Tromethamine, 0.136% Tris-HCl, 4.5% Trehalose dehydrate, 0.01% Polysorbate 80, 0.35% sodium chloride and 0.1% Aluminum in the form of aluminum hydroxide. (See Dosage and Administration Instructions for details.) Earlier studies were conducted with a 50 and 100 μg/dose strength in addition to the 200 μg dose. In these earlier studies the drug product was reconstituted with aluminum hydroxide diluent, sodium chloride diluent or QS-21 adjuvant product.

[0405] Aluminum Hydroxide Diluent for C difficile Vaccine Drug Product Reconstitution. The aluminum hydroxide diluent is presented as a sterile liquid suspension in a dosage strength of 1 mg/mL Aluminum in the form of aluminum hydroxide containing 0.351% sodium chloride. The aluminum hydroxide is supplied as a 0.73 mL fill in a 1 mL Type I borosilicate glass syringe with plastic luer lok adapter, rubber stopper and synthetic isoprene bromobutyl rubber tip cap with plastic rigid cap cover. A total of 0.68 mL of the aluminum hydroxide diluent is used to reconstitute the lyophilized drug product.

[0406] The preparation involves reconstitution of C difficile vaccine drug product with aluminum hydroxide diluent using a vial adapter. The entire contents of reconstituted drug product are withdrawn in the syringe using the vial adapter to enable a dose of 0.5 mL for IM administration.

[0407] In preclinical experiments, the vaccine candidate was studied either alone or in combination with an adjuvant. In the hamster model, all vaccine formulations demonstrated a survival benefit, providing at least 90% protection from a lethal challenge with C. difficile spores in the immunized hamsters. In nonhuman primates, all of the toxoid vaccine formulations tested induced robust neutralizing anti-toxin antibody responses to both C. difficile toxin A and C. difficile toxin B.

### Example 1—Mapping of the Neutralizing Monoclonal Antibody Binding Epitopes Using Hydrogen-Deuterium Exchange Mass Spectrometry and Cryogenic Electron Microscopy: Implications for the Understanding of the Protective Mechanisms Afforded by the C difficile Vaccine Candidates

[0408] Clostridium difficile is a spore-forming, Gram-positive bacterium, that can cause infections in subjects with weakened immune system or following antibiotic treatment. These infections may lead to pseudomembranous colitis and antibiotic-associated diarrhea in humans. As such, C difficile is a major cause of nosocomial illness worldwide. Major virulence factors of the bacterium are large clostridium toxins A and B, that are high molecular mass proteins with intrinsic glucosyltransferase activity. Toxoids, the products of genetic and chemical modification to eliminate the cytotoxicity of toxins A and B while preserving critical neutralizing epitopes, represent the antigens included in an experimental vaccine being developed.

[0409] Neutralizing epitopes (see FIG. 9 and FIG. 10) were identified using a combination of hydrogen-deuterium exchange mass spectrometry (HDX-MS) and cryogenic electron microscopy (cryo-EM). HDX-MS is based on differential solvent accessibility of the protein backbone with and without antibody present and provides a rapid and reliable identification of the binding epitopes, while cryo-EM is a high resolution technique that is being used to validate the HDX-MS results. Taking advantage of the high throughput afforded by HDX-MS, binding epitopes of over 30 mouse-derived monoclonal antibodies specific to the vaccine antigens were mapped. Localization of the epitopes within the functional domains of the respective antigens provides an indication as to the potential molecular mechanisms of protection afforded by antibodies induced through immunization.

### Example 2—Understanding the Sequence Diversity of the Clostridium difficile Virulence Factors TcdA and TcdB: Impact on Vaccine Development

[0410] Clostridium difficile is the most commonly recognized cause of infectious diarrhea in healthcare settings and represents a significant unmet medical need worldwide. Currently there is no vaccine to prevent initial or recurrent C difficile infection (CDI). Two large clostridial glucosylating toxins, TcdA and TcdB, are the primary virulence factors for CDI. The investigational C. difficile vaccine, which comprises a mixture of genetically and chemically inactivated C. difficile toxoids A (TxdA) and B (TxdB), is currently in phase III clinical trials. An understanding of the sequence diversity of the two toxins expressed by disease causing isolates is critical for the interpretation of the immune response to the vaccine antigens. Traditional molecular typing approaches for C. difficile disease epidemiology studies (e.g., ribotype, MLST) do not provide insight to toxin variant diversity.

[0411] The whole genome sequence (WGS) of >500 C difficile isolates collected from 12 countries between 2004-2018 has been determined to probe toxin variant diversity. A total of 39 unique TcdA variants (see FIG. 1) and 40 unique TcdB variants (see FIG. 2) have been identified. Each of the TcdA variants shares at least 98% amino acid sequence identity with TcdA001, the toxin variant used to develop the TxdA antigen. Sequence diversity among the TcdB variants is more substantial, ranging from 86.1% to >99% identity with TcdB001, the toxin variant used to develop the TxdB antigen.

[0412] The phylogenetic distance of the TcdA variants relative to variant TcdA001 is shown in FIG. 3. Phylogenetic distance and amino acid sequence diversity is reflected by the branch length between the respective variant types and TcdA001. Considering that toxin A is >2700 amino acids in length, differences, even at 2% of residues, correspond to >50 amino acids and these may be components of critical immune response epitopes. The greatest amino acid sequence diversity among the TcdA variants was detected within the C-terminal receptor binding domain, (e.g., among the most divergent TcdA variants, 96% sequence identity was observed over the final 500 amino acids). TcdA variant types marked by bold font in FIG. 3 correspond to toxins that have been functionally tested in neutralization assays (EXAMPLES 4, 5). Numbers in parenthesis adjacent to the TcdA variants in bold font correspond to the pairwise amino acid sequence identity with variant TcdA001.

[0413] Shown in FIG. 4, is a phylogenetic tree illustrating the sequence similarity among the 40 TcdB protein variant types identified from WGS of strains in a C difficile collection.

[0414] Phylogenetic distance and amino acid sequence diversity from variant TcdB001 is reflected by the branch length between the respective variant types and TcdB001. While sequence diversity from TcdB001 was detected across all functional domains of the toxin B protein variants, the greatest diversity mapped to the glucosyltransferase domain of the protein. TcdB variant types in bold font correspond to the toxins that have been functionally tested in neutralization assays (EXAMPLES 4, 5). Numbers in parenthesis adjacent to the TcdB variants in bold font correspond to the pairwise amino acid sequence identity with variant TcdB001.

### Example 3—Clostridium difficile Strain and Toxin Gene Diversity within a Clostridium difficile Collection

[0415] As the vaccine is designed to neutralize toxins, any assessment of the breadth of the immune response needs to consider the sequence heterogeneity of the toxin proteins expressed by contemporary disease causing isolates.

[0416] Ribotyping has been the benchmark strain characterization tool used in studies from around the world. There are greater than 60 different ribotypes represented in the Pfizer C difficile strain collection. Numerous strains belonging to the hypervirulent ribotypes 027 and 078 (also referred to as BI/NAP1 and BK/NAP7, respectively) are included in the collection. Strains expressing specific toxin A and toxin B variants were not restricted to a single ribotype. For example, in the collection, the gene coding for TcdB variant 002 is detected in strains ribotyped as 003, 027, 053, 078 and 014/020 (Table 3). The inverse is also true (e.g., ribotype 003 strains code for TcdB variants 001, 002, and 010) (Table 3). These examples illustrate that PCR-ribotyping is not a strain typing tool that is predictive of the toxin variant diversity associated with C difficile disease-causing isolates.

TABLE 3
Characterization of the Clostridium difficile Strain Collection
by Ribotype Does Not Address TcdA and TcdB Variant Diversity

| Ribotype | TcdA variants | TcdB variants |
|---|---|---|
| 027 | 002, 007, 010, 023, 048 | 002, 008, 012 |
| 001 | 010, 018 | 001, 012 |
| 078 | 007, 013 | 002, 004 |
| 002 | 010, 017 | 012, 016 |
| 003 | 018, 022 | 001, 010 |
| 013 | 010, 014, 025 | 008, 012, 021 |
| 014 | 010 | 012 |
| 053 | 001, 012, 039 | 001, 008 |
| 056 | 003, 011, 014, 042 | 012, 015, 037 |
| 070 | 015, 017 | 012, 016 |
| 106 | 002, 010, 013, 024 | 004, 009, 023, 024 |
| 126 | 013, 016, 017 | 004, 011, 016 |
| 258 | 010, 011 | 015, 026 |
| 014/020 | 003, 007, 010, 015, 043 | 001, 002, 007, 008, 012, |
| | | 028, 039 |
| 018/356 | 002, 010 | 009, 012 |

### Example 4—Toxin Neutralization Assay (TNA) with Immune Sera from Hamsters Immunized with Toxoid a and Toxoid B of the Investigational Vaccine

[0417] Serum from hamsters immunized with Toxoids A and B (of the investigational C difficile vaccine (PF-06425090)) was used to investigate the ability to neutralize the cytotoxic activity of toxins from a representative subset of circulating C difficile isolates. The ribotype and toxin variant type of the isolates tested in toxin neutralization assay (TNA) with hamster immune sera is listed in Table 4. In this assessment, the C difficile vaccine immune serum from hamsters was able to neutralize the cytotoxic activity of each of the toxins tested.

TABLE 4
Hamster Immune Serum is Able to Neutralize the Cytotoxicity of Toxins
Produced by Each of the Following Clostridium difficile Isolates

| C difficile Strain ID | Ribotype | TcdA | TcdB |
|---|---|---|---|
| PFECD0001 | 001 | TcdA010 | TcdB012 |
| PFECD0002 | 001 | TcdA010 | TcdB012 |
| PFECD0003 | 002 | TcdA017 | TcdB016 |
| PFECD0004 | 002 | TcdA010 | TcdB012 |
| PFECD0005 | 003 | TcdA018 | TcdB010 |
| PFECD0046 | 004 | TcdA005 | TcdB001 |
| PFECD0006 | 014 | TcdA010 | TcdB012 |
| PFECD0007 | 015 | TcdA014 | TcdB005 |
| PFECD0008 | 015 | TcdA014 | TcdB005 |
| PFECD0009 | 017 | null | TcdB003 |
| PFECD0010 | 017 | null | TcdB003 |
| PFECD0011 | 020 | TcdA003 | TcdB007 |
| PFECD0012 | 023 | TcdA019 | TcdB006 |
| PFECD0013 | 027 | TcdA010 | TcdB012 |
| PFECD0014 | 027 | TcdA007 | TcdB002 |
| PFECD0015 | 027 | TcdA007 | TcdB002 |
| PFECD0016 | 029 | TcdA019 | TcdB006 |
| PFECD0017 | 046 | TcdA004 | TcdB008 |
| PFECD0018 | 053 | TcdA012 | TcdB008 |
| PFECD0019 | 053 | TcdA012 | TcdB008 |
| PFECD0020 | 053 | TcdA012 | TcdB008 |
| PFECD0021 | 059 | TcdA011 | TcdB015 |
| PFECD0022 | 070 | TcdA017 | TcdB016 |
| PFECD0023 | 070 | TcdA015 | TcdB012 |
| PFECD0024 | 075 | TcdA010 | TcdB012 |
| PFECD0025 | 077 | TcdA010 | TcdB012 |
| PFECD0026 | 077 | TcdA010 | TcdB012 |
| PFECD0027 | 078 | TcdA013 | TcdB004 |
| PFECD0028 | 078 | TcdA013 | TcdB004 |
| PFECD0029 | 078 | TcdA013 | TcdB004 |
| PFECD0030 | 078 | TcdA013 | TcdB004 |
| PFECD0031 | 081 | TcdA009 | TcdB013 |
| PFECD0032 | 087 | TcdA009 | TcdB001 |
| PFECD0033 | 095 | TcdA010 | TcdB012 |
| PFECD0034 | 106 | TcdA013 | TcdB004 |
| PFECD0035 | 106 | TcdA002 | TcdB009 |
| PFECD0036 | 117 | TcdA005 | TcdB001 |
| PFECD0037 | 126 | TcdA017 | TcdB016 |
| PFECD0038 | 126 | TcdA013 | TcdB004 |
| PFECD0039 | 126 | TcdA016 | TcdB011 |
| PFECD0040 | 131 | TcdA017 | TcdB016 |
| PFECD0041 | 154 | TcdA010 | TcdB014 |
| PFECD0042 | tbd | TcdA007 | TcdB002 |
| PFECD0043 | tbd | TcdA008 | TcdB008 |
| PFECD0044 | tbd | TcdA012 | TcdB008 |
| PFECD0045 | tbd | TcdA016 | TcdB011 |
| PFECD0047 | tbd | TcdA005 | TcdB001 |
| PFECD0048 | tbd | TcdA007 | TcdB002 |
| PFECD0049 | tbd | TcdA010 | TcdB012 |

[0418] Toxins from culture supernatants of several C difficile isolates were evaluated in neutralization assays using sera from hamsters immunized with TxdA and TxdB. Hamster immune sera was able to neutralize the cytotoxicity of each toxin preparation. The phylogenetic distance of each of the toxin variant types from the TcdA001 and TcdB001 variants is illustrated in FIG. 3 and FIG. 4.

### Example 5—Further Assessment of the Breadth of Coverage of Clostridium difficile Vaccine

[0419] We sought to demonstrate that the polyclonal immune response to vaccination of human subjects is effective at neutralizing toxins that represent the diversity of C difficile strains globally. A subset of isolates with diverse toxin A and toxin B protein sequences were selected for functional analysis in neutralization assays using human serum obtained from subjects immunized with the C difficile vaccine. These toxin variants are illustrated with bold font in FIG. 3 and FIG. 4.

[0420] An example of the ability of polyclonal human immune sera to effectively neutralize the cytotoxic activity of a sequence-diverse toxin (TcdB011, 87% amino acid sequence identity with the vaccine antigen TcdB001 [FIG. 4]) is illustrated in FIG. 5. It is likely that novel toxin variants will continue to be identified as the C difficile strain collection grows with the addition of isolates from different geographic regions.

[0421] Human serum from vaccinated subjects is able to neutralize the cytotoxic activity of toxin variant TcdB011, which shares just 87% amino acid sequence identity with the vaccine antigen TcdB001 (FIG. 4). The level of cellular ATP, a measure of cell viability, is determined using the luminescent Cell Titer-Glo® reagent and reported as relative luminescence units (RLU). The green dashed line illustrates the luminescence output when cells are incubated in the absence of toxin, while the red dashed line provides an indication of cell viability in the presence of toxin variant TcdB011 (tested at a level of toxin equivalent to 4×EC₅₀, determined in a cytotoxicity assay). Sera from three vaccinated human subjects and a human reference standard are titrated from left to right and illustrate the ability of these serum samples to block or neutralize the cytotoxic effect of toxin variant TcdB011, a variant that shares just 87% amino acid sequence identity with the vaccine antigen.

[0422] The vaccine induces polyclonal antibodies that neutralize diverse toxins and shows protection in preclinical models. See, for example, FIG. 11. The vaccine, formulated with aluminum hydroxide, has been shown to be immunogenic and well tolerated in healthy adults aged 50 to 85 years in Phase 1 and 2 clinical studies. Robust neutralizing antibodies are induced that persist over time.

### Example 6—a Phase 3, Randomized, Observer-Blinded Study to Evaluate the Immunogenicity, Safety, and Tolerability of 2 Doses Compared to 3 Doses of Clostridium Difficile Vaccine in Adults 50 Years of Age and Older (B5091019)

[0423] Overall Design

[0424] This is a Phase 3, randomized, observer-blinded study to evaluate the immunogenicity, safety, and tolerability of a 2-dose regimen of C difficile vaccine compared to a 3-dose regimen of C difficile vaccine in adults 50 years of age and older.

[0425] Participants will be randomly assigned in parallel in a 1:1 ratio to receive C difficile vaccine (200 μg total toxoid) at Months 0, 1, and 6 (3-dose group) or at Months 0 and 6 (2-dose group). The participants in the 2-dose group will receive placebo (saline) at Month 1.

[0426] Investigational Products

[0427] Clostridium difficile Vaccine

[0428] The investigational C difficile vaccine is toxoid based. C difficile toxin A and toxin B are inactivated by a combination of genetic mutations and chemical treatments. The vaccine is provided as a sterile lyophilized powder in a dosage strength of 200 μg/dose (total for toxoids A and B). The vaccine will be reconstituted with aluminium hydroxide (AlOH) diluent immediately before use as instructed in the investigational product manual (IP manual). The AlOH diluent is supplied as a 1-mg aluminum/mL (as AlOH) liquid suspension.

[0429] Placebo (2-Dose Regimen Only)

[0430] The placebo will consist of a sterile normal saline solution for injection (0.9% sodium chloride injection, in a 0.5-mL dose) in a prefilled syringe (PFS) and will be provided by the sponsor to each study site.

[0431] Number of Participants

[0432] Approximately 500 participants will be randomized into the study, such that approximately 400 (200 per [dose] group) evaluable participants complete the study.

[0433] Statistical Methods

[0434] The study sample size estimate is based on the evaluation of the primary immunogenicity objective of the study, as well as the evaluation of the secondary immunogenicity objective-to demonstrate that the immune responses induced by 2 doses of C difficile vaccine (administered in a 0- and 6-month regimen) are noninferior to the immune responses induced by 3 doses of C difficile vaccine (administered in a 0-, 1-, and 6-month regimen)—by evaluating the toxin A- and toxin B-specific neutralizing antibody in terms of GMC ratios, 1 month and 6 months after the last investigational product administration. Two hundred (200) evaluable participants per group will provide a power of 91% to meet the primary objective of noninferiority of a 2-dose to a 3-dose regimen for both toxin A and toxin B, 1 month after Dose 3; and the secondary immunogenicity objective at 6 months after Dose 3, assuming the noninferiority margin is 0.5. The primary immunogenicity objective of noninferiority of the 2-dose regimen compared with the 3-dose regimen will be achieved if the lower limit of the 2-sided 95% confidence intervals (Cis) for the GMC ratios (2-dose/3-dose regimen) is >0.5 for both toxin A and toxin B. The same criteria will be used for the secondary immunogenicity objective evaluation, which will be conducted only after the primary immunogenicity objective is met.

[0435] Assuming a maximum study nonevaluable rate of 20% and a randomization ratio of 1:1, a total of 500 participants need to be randomized in the study to meet the primary and secondary immunogenicity objectives.

[0436] The GMC ratio of the 2-dose regimen to the 3-dose regimen for C difficile toxin A- and toxin B-specific neutralizing antibody levels at Month 7 and Month 12 will be computed along with the 95% CIs. The GMC will be calculated as the mean of the assay results after making the logarithm transformation and then back transformation to its original scale. Two (2)-sided 95% CIs will be constructed by back transformation of the CI for the mean of the logarithmically transformed assay results computed based on the Student t distribution.

[0437] For the exploratory immunogenicity endpoints, GMCs, geometric mean fold rises (GMFRs) from baseline, and the immune response by baseline serostatus will be summarized by vaccine regimen along with the 95% CIs for both toxin A and toxin B.

[0438] All safety and reactogenicity endpoints will be summarized as proportions of participants with events by vaccine group. Additionally, exact 2-sided 95% CIs for proportions will be calculated using the Clopper-Pearson method.

[0439] Study Rationale

[0440] The purpose of the study is to evaluate the immunogenicity, safety, and tolerability of a 2-dose regimen of the C difficile vaccine compared to a 3-dose regimen of the C difficile vaccine in adults 50 years of age and older. The study will recruit participants who may be at increased risk for developing CDI, and the study population, inclusion criteria, and exclusion criteria will be consistent with those of the Phase 3 B5091007 efficacy study, allowing direct immunological comparison. The C difficile vaccine program utilizes a 3-dose vaccine regimen at Months 0, 1, and 6 with a 200-μg dose. The 200-μg month regimen in our Phase 2 B5091009 study, our ongoing B5091007 efficacy study, and our B5091008 lot-consistency study utilize this regimen and dose.

[0441] A 2-dose vaccine regimen would presumably improve compliance. This study, therefore, will be a noninferiority study comparing a 3-dose regimen (Months 0, 1, and 6) with a 2-dose regimen (Months 0 and 6).

[0442] Mechanism of Action/Indication

[0443] The investigational C difficile vaccine (PF-06425090) is a prophylactic vaccine that is currently being investigated for the prevention of primary CDI in adults 50 years of age and older.

[0444] Clostridium difficile Vaccine Candidate

[0445] The C difficile vaccine candidate consists of a 1:1 mixture of C difficile toxoids A and B. The toxoids were derived from native toxins by genetic modification to decrease toxin activity, and chemical inactivation prior to final purification and formulation of the drug substance.

[0446] Preclinical Development

[0447] In preclinical experiments, the C difficile candidate vaccine was studied either alone or in combination with AlOH. Using the standard hamster C difficile disease model, vaccine formulations with and without AlOH demonstrated a survival benefit, providing at least 90% protection from a lethal challenge with C difficile spores in the immunized hamsters. In addition, pooled sera obtained from hamsters immunized with the C difficile vaccine formulated with AlOH neutralized secreted toxins from C difficile isolates representing diverse ribotypes/pulsed-field gel electrophoresis (PFGE) types, including hypervirulent strains, and covering >67% and >70% of the circulating strains in the United States and Europe, respectively. Furthermore, in nonhuman primates, the toxoid vaccine formulations with and without AlOH induced robust neutralizing antitoxin antibody responses to both TcdA and TcdB. The preclinical data generated in rhesus macaques support the use of a 3-dose regimen of the C difficile vaccine, with or without AlOH.

[0448] Clinical Development

[0449] The B5091001 first-in-human study was a placebo-controlled, randomized, observer-blinded Phase 1 study that evaluated the safety, tolerability, and immunogenicity of the C difficile vaccine. Three (3) antigen dose levels (50, 100, and 200 μg) were assessed and administered either alone or in combination with AlOH at Months 0, 1, and 6 to healthy adults 50 to 85 years of age. Overall, the C difficile vaccine formulations and dose levels administered were generally well tolerated. In participants who received the vaccine formulations, both the toxin A- and toxin B-specific neutralizing antibody GMCs increased substantially at 1 month after Dose 2 and after Dose 3 compared to baseline. In the 50- to 64-year age cohort, GMFRs in toxin A-specific neutralizing antibodies from baseline at Month 7 ranged from 59.19 to 149.23 in the dose groups compared to 2.47 in the control group. For toxin B-specific neutralizing antibodies, the GMFRs from baseline at Month 7 ranged from 116.67 to 2503.75 in the dose groups compared to 2.48 in the control group. In the 65- to 85-year age cohort, the GMFRs in toxin A-specific neutralizing antibodies from baseline at Month 7 ranged from 42.73 to 254.77 in the dose groups compared to 2.03 in the control group. For toxin B-specific neutralizing antibodies, the GMFRs from baseline at Month 7 ranged from 136.12 to 4922.80 in the dose groups compared to 1.58 in the control group. Potent antitoxin neutralizing responses were still evident in immunized participants in both age groups at Month 12. Although there was no clear dose-level response pattern, the data suggest that both the antitoxin A- and antitoxin B-specific neutralizing responses were trending higher in the toxoid-only groups compared to the toxoid+AlOH groups. Furthermore, the magnitude of the immune response was similar in the 2 age cohorts. Study B5091003, a Phase 2 study, was conducted to assess 2 antigen dose levels (100 and 200 μg) of the toxoids alone reconstituted with sodium chloride (60 mM) diluent administered as a 3-dose regimen (Days 1, 8, and 30) in healthy adults 50 to 85 years of age. Following the observed tolerability profile in Study B5091003, the decision was made to progress development of the aluminum-containing formulation into a second Phase 2 study, B5091009.

[0450] Study B5091009 (original planned stage up to 12 months after the third dose) was a Phase 2, placebo-controlled, randomized, observer-blinded study to assess the safety, tolerability, and immunogenicity of 2 antigen dose levels (100 μg and 200 μg total toxoid) of aluminum hydroxide—containing C difficile vaccine administered as a 3-dose regimen: either at Days 1, 8, and 30 (day regimen) or at Months 0, 1, and 6 (month regimen) in participants at US sites. Results from the original planned stage of the study demonstrated that the 200-μg dose level was more immunogenic, as evidenced by numerically higher proportions of participants achieving antibody levels prespecified thresholds, GMCs, and GMFRs, than the 100-μg dose level in both dosing regimens. The month regimen resulted in numerically higher post-Dose 3 immune response for both the 100-μg and 200-μg dose levels, particularly for toxin B in participants who were seronegative at baseline. The immune responses by age group (65 to 69 years, 70 to 74 years, and 75 to 79 years) were similar to that of the combined age group (65 to 85 years) as determined by proportions of participants achieving both toxin A- and toxin B-specific neutralizing antibody levels specified thresholds, GMCs, and GMFRs at 1 month after Dose 3 for the month regimen and 7 days after Dose 3 for the day regimen. The number of participants 80 to 85 years of age was small and the interpretation of results for this age group should be conducted with caution. Local reactions increased after Dose 2 for both regimens, but it was to a greater extent when it was administered at Day 8 in the day regimen, particularly at the 200-μg dose level. Rates of systemic events were similar between placebo and the 2 vaccine dose levels. Overall, the AE profile observed in this study identified no untoward safety signals. Overall, the C difficile vaccine was highly immunogenic, was well tolerated, and exhibited an acceptable safety profile. The ongoing Phase 3 efficacy study (B5091007) is a placebo-controlled, randomized (1:1, vaccine: placebo), observer-blinded, parallel-group study in participants 50 years of age or older who have an increased risk of CDI. In the absence of an accepted immunological correlate of protection for CDI, vaccine efficacy (VE) will be determined by comparing the CDI incidence in recipients of the investigational vaccine with those receiving placebo.

[0451] The ongoing Phase 3 lot-consistency study (B5091008) is a placebo-controlled, randomized 1:1:1:1 (Lot 1:Lot 2:Lot 3:placebo), observer-blinded study to evaluate the lot consistency, safety, tolerability, and immunogenicity of the C difficile vaccine 200-μg dose level administered at Months 0, 1, and 6 in healthy adults 65 to 85 years of age.

[0452] The present study (B5091019) is a Phase 3, randomized, observer-blinded study to evaluate the immunogenicity, safety, and tolerability of a 3-dose C difficile vaccine regimen compared to a 2-dose C difficile vaccine regimen in adults 50 years of age and older.

[0453] The B5091001 first-in-human study, which assessed 3 antigen dose levels (50, 100, and 200 μg) administered either alone or in combination with AlOH at Months 0, 1, and 6 to healthy adults 50 to 85 years of age, demonstrated that the C difficile vaccine formulations and dose levels administered were generally well tolerated.

[0454] The B5091009 Phase 2 study, which assessed 2 antigen dose levels (100 and 200 μg) administered in combination with AlOH at Months 0, 1, and 6 or Days 1, 8, and 30 to healthy adults 65 to 85 years of age, demonstrated that both regimens and both dose levels administered were generally well tolerated. After Dose 2, local reactogenicity was greater when the vaccine was administered at Day 8 compared to Month 1, particularly for the 200-μg dose level. Systemic events were also predominantly mild to moderate and the incidences of individual events were similar between the placebo group, the 100-μg dose group, and the 200-μg dose group. Within each regimen, the overall AE incidence rates were also similar between the placebo, 100-μg, and 200-μg dose groups.

[0455] Both studied dose levels resulted in substantial neutralizing antitoxin A and B titers, with the immunogenicity profile following 3 doses administered at Months 0, 1, and 6 being preferred. In addition, the 200-μg dose level was more immunogenic than the 100-μg dose level.

[0456] Study B5091010, a first-in-Japanese participants study, was a Phase 1, placebo-controlled, randomized, observer-blinded study to assess the safety, tolerability (primary objectives), and immunogenicity (secondary objectives) of 2 antigen dose levels of the AlOH-containing vaccine (ie, 100 μg and 200 μg) in 2 different dosing regimens (Months 0, 1, and 6 [month regimen] or Days 1, 8, and 30 [day regimen]) in healthy Japanese adults, 65 to 85 years of age. The C difficile vaccine was well tolerated when administered in the 0-, 1-, and 6-month regimen with no unexpected AEs observed in this regimen, indicating a favorable safety profile in this elderly population of healthy Japanese adults 65 to 85 years of age when administered in the month regimen. There were no notable differences between the 100- or 200-μg dose groups observed within each regimen based on an evaluation of the proportion of participants reporting AEs, SAEs, or newly diagnosed chronic medical conditions (NDCMCs).

[0457] Thus, C difficile vaccinations at a dose of 100 or 200 pig were generally well tolerated when given according to a Month 0, 1, and 6 regimen.

[0458] The available information from Studies 85091001, 85091009, and 85091010 with PF-06425090 supports a favorable benefit-risk profile for studies administrating 3 doses of the C difficile vaccine at dose levels up to 200 pig formulated with AlOH, as a potential prevention against CDI. It is expected that this would also apply to a 2-dose regimen of the vaccine given 6 months apart, and especially so since the reactogenicity after Dose 2 (at Month 1 seen in all 3 studies, 85091001, 85091009, and 85091010) was the most pronounced.

[0459] Overall Design

[0460] This is a Phase 3, randomized, observer-blinded study to evaluate the immunogenicity, safety, and tolerability of a 2-dose C difficile vaccine regimen compared to a 3-dose C difficile vaccine regimen in adults 50 years of age and older.

[0461] Participants will be randomly assigned in parallel in a 1:1 ratio to receive one of the following dosing regimens according to the visit schedule:
[0462] 2-Dose: Participants will receive 1 dose of C difficile vaccine (200 pig total toxoid per dose) at Visit 1 (Month 0) and Visit 4 (Month 6) and 1 dose of placebo (0.9% sodium chloride or normal saline) at Visit 2 (Month 1).
[0463] 3-Dose: Participants will receive 1 dose of C difficile vaccine (200 pig total toxoid per dose) at Visit 1 (Month 0), Visit 2 (Month 1), and Visit 4 (Month 6).

[0464] Approximate Number of Participants

[0465] Approximately 500 participants will be randomized into the study, with a randomization ratio of 1:1 (2-dose C difficile vaccine: 3-dose C difficile vaccine).

[0466] To achieve a broad representation of age groups among those 50 years of age and older, randomization into an age cohort will be managed by the central randomization process. The targeted number of participants and age cohorts intended to be randomized is shown in Table 5.

TABLE 5
Intended Numbers of Participants Included in the Study, by Age

| | | Minimum Number | Maximum Number |
|---|---|---|---|
| Age Category | | for Inclusion | for Inclusion |
| 50-59 | years | Not limited | 50 participants |
| 60-69 | years | 75 | Not limited |
| ≥70 | years | 75 | Not limited |

[0467] Scientific Rationale for Study Design

[0468] Demonstrating that the 2-dose vaccine regimen can generate comparable noninferior antibody responses compared with the 3-dose vaccine regimen provides the clinical rationale for a 2-dose vaccine regimen. This argument may be informed by the successful efficacy anticipated to be demonstrated in the pivotal B5091007 clinical endpoint efficacy study. Efficacy in Study B5091007 may be associated with an immunological profile after the third dose at 6 months in participants who received a 3-dose regimen at Months 0, 1, and 6. Therefore, if participants who received a 2-dose regimen at Months 0 and 6 achieve a noninferior comparable immunological response 1 month after their Month 6 dose compared with the response achieved by the participants who received a 3-dose regimen 1 month after their third dose at Month 6, where efficacy against a clinical endpoint is established, one can infer that similar VEs would be seen with the 2-dose vaccine regimen and the 3-dose vaccine regimen.

[0469] Justification for Dose

[0470] Dose selection was derived from Study B5091009 where 2 doses (100 μg and 200 μg) and 2 dosing regimens (Months 0, 1, and 6; and Days 1, 8, and 30) were compared against placebo.

[0471] The study demonstrated that the 200-μg dose level was more immunogenic as evidenced by numerically higher proportions of participants achieving antibody levels threshold, GMCs, and GMFRs than those for the 100-μg dose level in both dosing regimens; and that the month regimen resulted in a higher post-Dose 3 immune response for both the 100-μg and 200-μg dose levels.

[0472] Based on these results from Study B5091009, the dosing level to be used in Phase 3 studies is 200 μg, and the regimen to be used is 3 doses administered by intramuscular (IM) injection at Months 0, 1, and 6.

[0473] Hence, 200 μg will be used for both the 2-dose regimen (at Months 0 and 6) and the 3-dose regimen (at Months 0, 1, and 6).

[0474] Study Population

[0475] Inclusion Criteria

[0476] Participants were eligible to be included in the study only if all of the following criteria apply:

[0477] Age and Sex:

[0478] 1. Male or female participants 50 years of age or older at enrollment.

[0479] 2. Willing and able to comply with scheduled visits, vaccination plan, and other study procedures.

[0480] 3. Participants with an increased risk of future contact with healthcare systems by virtue of:
[0481] At least 1 inpatient hospitalization of nights' duration in the previous 12 months; or
[0482] At least 2 emergency room visits in the previous 12 months; or
[0483] At least 10 outpatient visits (primary and/or secondary care visits but excluding pharmacy and mental health visits) in the previous 12 months; or
[0484] Residence in a skilled nursing facility (a residential institution that provides professional nursing care and rehabilitation services, usually following discharge from the hospital); or
[0485] Residence in a nursing home (a residential institution that provides assistance with activities of daily living); or
[0486] Inpatient hospitalization of nights' duration scheduled 37 days after randomization.
[0487] Or participants who have received systemic (i.e., oral or injected) antibiotics at any time in the previous 12 weeks.

[0488] 4. Ability to be contacted by telephone during study participation.

[0489] Study Intervention(s) Administered

[0490] The investigational C difficile vaccine (PF-06425090) is toxoid based. C difficile toxin A and toxin B are inactivated by a combination of genetic mutations and chemical treatments. The vaccine is provided as a sterile lyophilized powder containing a total toxoid dose of 200 μg (100 μg each of toxoids A and B). The vaccine will be reconstituted with AlOH 1-mg/mL liquid suspension for injection (diluent) immediately before use.

[0491] Participants randomized to the 2-dose regimen will receive 2 doses of C difficile vaccine (200 μg total toxoid per dose) and 1 dose of placebo (sterile normal saline solution, 0.9% sodium chloride).

[0492] Participants randomized to the 3-dose regimen will receive 3 doses of C difficile vaccine (200 μg total toxoid per dose).

[0493] Table 6 describes the study intervention(s)s that will be administered.

TABLE 6
Description of Study Intervention(s)

| Intervention Name | PF-06425090 | Placebo for PF-06425090 |
|---|---|---|
| Regimen | C difficile vaccine (200 μg) 3- | C difficile vaccine (200 μg) 2- |
| | dose regimen and C difficile | dose regimen |
| | vaccine (200 μg) 2-dose | |
| | regimen | |
| Dose Formulation | Lyophilized powder for | Prefilled syringe |
| | reconstitution for injection | |
| | with AlOH 1-mg/mL | |
| | suspension for injection | |
| Unit Dose Strength(s) | 200 μg/dose (0.5 mL) | 0.9% sodium chloride |
| | | (0.5 mL) |
| Dosage Level(s) | 0.5-mL dose at Visits 1, 2, | 0.5-mL dose at Visit 2 (Month |
| | and 4 (Months 0, 1, and 6) | 1) for 2-dose regimen only |
| | for 3-dose regimen | |
| | 0.5-mL dose at Visits 1 and 4 | |
| | (Months 0 and 6) for 2-dose | |
| | regimen | |
| Route of Administration | Intramuscular | Intramuscular |
| Packaging and Labeling | Study intervention will be | Study intervention will be |
| | provided in a single-use vial. | provided in a single-dose |
| | Each vial will be packaged in | prefilled syringe. Each |
| | a carton with 1 single-dose | syringe will be packaged in a |
| | prefilled syringe of AlOH 1- | carton with a blinded label |
| | mg/mL suspension for | and a tamper-evident seal. |
| | injection (diluent) and a vial | |
| | adapter. The carton will have | |
| | a blinded label and a tamper- | |
| | evident seal. | |

Abbreviations: AlOH = aluminum hydroxide; IMP = investigational medicinal product; IP manual = investigational product manual.

[0494] Administration

[0495] All injections will be administered in the upper deltoid muscle, preferably of the nondominant arm, by the unblinded administrator.

[0496] Participants will be administered the following injections according to the dosing regimen to which the participant is randomized:
[0497] 2-Dose: Participants will receive 1 dose of C difficile vaccine (200 μg total toxoid per dose) at Visit 1 (Month 0) and Visit 4 (Month 6) as well as 1 dose of placebo (0.9% sodium chloride or normal saline) at Visit 2 (Month 1).
[0498] 3-Dose: Participants will receive 1 dose of C difficile vaccine (200 μg total toxoid per dose) at Visit 1 (Month 0), Visit 2 (Month 1), and Visit 4 (Month 6).

[0499] Immunogencity Assessments

[0500] Both toxin A- and toxin B-specific neutralizing antibody levels will be measured. Approximately 20 mL (minimum of 10 mL and up to 20 mL) of blood will be collected (at Visit 1, Visit 4 [these must be prior to vaccination] Visit 5, and Visit 6) for each measurement to allow for adequate volume required for repeat testing or additional antigen-specific immunogenicity testing to be performed.

[0501] Estimands and Statistical Hypotheses

[0502] The primary objective of assessing noninferiority of the 2-dose regimen to the 3-dose regimen will be evaluated at 1 month after the last dose for each C difficile toxin A- or toxin B-specific neutralizing antibody. The evaluable immunogenicity population will be used for the hypothesis testing to assess the primary immunogenicity objective.

[0503] The null hypothesis (H₀) for noninferiority is:

H₀: ln(μ₂)−ln(μ₃)≤−ln(2)

[0504] Where ln(μ₂) and ln(μ₃) are the means of the natural logarithm-transformed data of the C difficile toxin A- or toxin B-specific neutralizing antibody concentration from participants receiving the 2-dose regimen and the 3-dose regimen, respectively, measured 1 month (primary immunogenicity endpoint) after the third vaccination (Month 7) with C difficile vaccine. The neutralizing antibody concentration data will be logarithmically transformed for analysis of GMC ratios, along with 95% CIs.

[0505] If the lower limit of 2-sided 95% CI for the GMC ratio (2-dose/3-dose) is >0.5 for both toxin A- and toxin B-specific neutralizing antibodies, 1 month after the third vaccination, the primary objective of establishing noninferiority of the 2-dose regimen to the 3-dose regimen is met. The same null hypothesis for the secondary immunogenicity objective will be evaluated 6 months after the third vaccination following the success of the primary objective.

[0506] Immunogenicity:

[0507] GMC ratio, estimated by the ratio of the observed GMC of toxin A- and toxin B-specific neutralizing antibody from the 2-dose regimen group to the 3-dose regimen group in participants receiving C difficile vaccine and in compliance with the key protocol criteria (evaluable participants).

[0508] This estimand estimates the regimen effect in the hypothetical setting where participants follow the study schedules and protocol requirements as directed. It addresses the primary objective of estimating the maximum potential difference between the 2- and 3-dose regimens, since the impact of noncompliance is likely to diminish the observed difference between the 2 regimens (e.g., when participants randomized to the 3-dose regimen receive only 2 doses).

[0509] GMC ratio, estimated by the ratio of the observed GMC of toxin A- and toxin B-specific neutralizing antibody from the 2-dose regimen group to the 3-dose regimen group in participants receiving C difficile vaccine and in compliance with the key protocol criteria (evaluable participants).

[0510] This estimand estimates the regimen effect in the hypothetical setting where participants follow the study schedules and protocol requirements as directed. It addresses the primary objective of estimating the maximum potential difference between the 2- and 3-dose regimens, since the impact of noncompliance is likely to diminish the observed difference between the 2 regimens (e.g., when participants randomized to the 3-dose regimen receive only 2 doses).

### Example 7: Design and Conduct of a Large Phase 3 Efficacy Study of an Investigational Clostridium difficile Vaccine (Clover)

[0511] Background: Clostridium (Clostridioides) difficile infection (CDI) causes diarrhea and colitis, which can be life-threatening, mostly in patients who have had recent healthcare contact and/or received antibiotics. CDI has been recognized by the Centers for Disease Control and Prevention as an urgent public health threat. Clover (B5091007, NCT03090191) is a multinational Phase 3 study evaluating the efficacy, safety and tolerability of an investigational toxoid-based C. difficile vaccine. Since no immunological correlate of protection for CDI exists, evaluation of vaccine efficacy requires collection and microbiological testing of diarrheal specimens.

[0512] Methods: The study population and sample size were determined based upon the anticipated number of confirmed cases of CDI and were informed by epidemiological studies and literature review. Sophisticated stool collection, transport and testing methodologies were developed to assess all episodes when a subject experiences unformed stools (Bristol stool chart types 5-7) in a 24 hour period. An electronic method to maintain contact with subjects and facilitate recording of diarrheal episodes was developed.

[0513] Results: Eligibility for inclusion was based on healthcare contact in the previous 12 months, planned hospitalization or receipt of systemic antibiotics in the previous 12 weeks. The target enrolment of 17,476 subjects 50 years of age was achieved in 24 months. A stool collection kit was developed and refined after field testing. Since C. difficile toxins are heat labile, a simple-to-use self-cooling shipping unit that activates upon pressing a button was developed and validated. A two-step diagnostic stool testing algorithm was developed and validated: the first detects toxigenic C. difficile by polymerase chain reaction and the second measures the presence of toxin A and/or B by cell cytotoxicity neutralization assay using a proprietary assay. An app, used on a subject's own smartphone or a provided device, was developed to allow recording episodes of diarrhea, triggering reminders to collect stool samples and pick up, and to remind subjects periodically to demonstrate their continued participation in the study.

### Example 8: Ribotype Classification of Clostridioides Difficile Isolates is not Predictive of the Amino Acid Sequence Diversity of the Toxin Virulence Factors TcdA and TcdB

[0514] Clostridioides (Clostridium) difficile is the most commonly recognized cause of infectious diarrhea in healthcare settings. Currently there is no vaccine to prevent initial or recurrent C. difficile infection (CDI). Two large clostridial toxins, TcdA and TcdB, are the primary virulence factors for CDI. Immunological approaches to prevent CDI include antibody-mediated neutralization of the cytotoxicity of these toxins. An understanding of the sequence diversity of the two toxins expressed by disease causing isolates is critical for the interpretation of the immune response to the toxins. In this study, we determined the whole genome sequence (WGS) of 478 C. difficile isolates collected in 12 countries between 2004-2018 to probe toxin variant diversity. A total of 44 unique TcdA variants and 37 unique TcdB variants were identified. The amino acid sequence conservation among the TcdA variants (≥98%) is considerably greater than among the TcdB variants (as low as 86.1%), suggesting that different selection pressures may have contributed to the evolution of the two toxins. Phylogenomic analysis of the WGS data demonstrate that isolates grouped together based on ribotype or MLST code for multiple different toxin variants. These findings illustrate the importance of determining not only the ribotype but also the toxin sequence when evaluating strain coverage using vaccine strategies that target these virulence factors. We recommend that toxin variant type and sequence type (ST), be used together with ribotype data to provide a more comprehensive strain classification scheme for C. difficile surveillance during vaccine development objectives.

[0515] Introduction

[0516] Clostridioides (Clostridium) difficile, a Gram-positive, spore-forming, obligate anaerobe, is the main cause of nosocomial infectious diarrhea in industrialized countries. The bacterium accounts for 20% to 30% of cases of antibiotic-associated diarrhea and is the most commonly recognized cause of infectious diarrhea in healthcare settings. The main risk factors for an initial episode of C. difficile infection (CDI) are antibiotic therapy, hospitalization, and underlying comorbidities. Older adults (65 years of age) are at increased risk for CDI, particularly when exposed to health care settings.

[0517] C. difficile can produce 3 toxins, toxin A (TcdA), toxin B (TcdB) and binary toxin (CDT). TcdA and TcdB are large single subunit proteins (approximately 308 and 270 kDa, respectively) and are considered the principal virulence factors contributing to CDI. These two toxins have similar structural features delineated by four functional domains but share just 50% overall amino acid sequence identity. The C-terminal domain of the toxin proteins, known as the combined repetitive oligopeptide (CROP) domain, facilitates toxin binding to the surface of intestinal epithelial cells. The toxins enter the cell by endocytosis where the reduced pH of endocytic vesicles triggers a conformational change in the cell entry domain of the toxin, resulting in pore formation and translocation of the glucosyltransferase domain (GTD) and autoprocessing domain (APD) to the cytosolic face of the membrane. Binding of the cytosolic cofactor InsP6 activates the APD, resulting in cleavage and release of the GTD. GTD-catalyzed transfer of glucose inactivates small cytoplasmic GTPases of the Rho family of proteins, leading to the disruption of the cytoskeleton. This manifests as a cytopathic rounding effect and cell death in the epithelium which results in diarrhea. CDT belongs to the family of binary ADP-ribosylating toxins consisting of two components: CDTa (ADP-ribosyltransferase) and CDTb (responsible for host cell binding and translocation of CDTa to the cytosol). As cdtA and cdtB are not detected in all toxigenic isolates, the significance of CDT as a virulence factor contributing to CDI remains in question.

[0518] CDI often occurs when the integrity of the normal intestinal microbiota is disturbed. The spectrum of CDI presentation includes mild self-limiting to severe diarrhea which may progress to pseudomembranous colitis, toxic megacolon, intestinal perforation, and death. Although most patients experiencing a first episode of CDI respond well to standard antibiotic treatment (which can include metronidazole, vancomycin or fidaxomicin), approximately 15% to 35% of patients suffer from at least one recurrence. Immunoprophylactic approaches that target C. difficile toxins have been developed for the prevention of recurrent CDI. Vaccines have been successfully developed to prevent other toxin mediated diseases, such as tetanus and diphtheria, by inducing antibodies that neutralize the cytopathic effect of the toxin. The proposed mechanism of action of these approaches is through antibody mediated (both monoclonal antibody as well as vaccine-elicited polyclonal responses) neutralization of the cytotoxic activity of toxins produced by disease-causing C. difficile isolates. Several molecular methods have been used to type C. difficile isolates for epidemiological studies. These include restriction endonuclease analysis (REA), pulse field gel electrophoresis (PFGE), and ribotyping, a PCR-based method that takes advantage of the size heterogeneity of the intergenic spacer region (ISR) between 16S and 23S rRNA genes. Isolates can also be classified by toxinotype, a restriction fragment length polymorphism (RFLP) method that is based on changes in the C. difficile pathogenicity locus (PaLoc). C. difficile may also be grouped into five main clades and at least three additional cryptic clades based on the clustering of the concatenate multiple locus sequence typing (MLST) alleles. While each of these methods provides value for isolate characterization in epidemiological studies, none provides detailed insight to the diversity of full length TcdA and TcdB proteins. Reports on sequence-based variability within TcdA and TcdB toxins in large strain collections are uncommon. Sequence diversity within a 199 amino acid fragment of the CROP domain of TcdB (corresponding to the receptor binding domain of the toxin), has been used to differentiate toxin variant types. An understanding of toxin diversity among contemporary disease-causing isolates is essential for assessment of the immune response to the toxins. In this manuscript we report on the deduced amino acid sequence of TcdA and TcdB toxin proteins determined from whole genome nucleotide sequence data of 478 C difficile isolates. A total of 44 TcdA and 37 TcdB protein variants have been identified among these isolates and are presented together with detailed molecular analyses.

[0519] Methods

[0520] Strain Collection, Isolate Selection, Microbiology and DNA Isolation

[0521] Initially, a total of 504 C. difficile isolates, collected from multiple sources across several geographic regions between the years 2004 to 2018 were included in this study (Table 7). The isolates do not represent a prevalence-based collection. Whole genome sequence (WGS) data was collected for all isolates and the PCR ribotype was determined for each of the isolates. Toxinotype assignments were available for a subset of the isolates. C. difficile isolates were either provided as glycerol stocks or were purified from stool specimens. All microbiology was conducted under anaerobic conditions. Glycerol stocks were plated onto Tryptone Soya Agar (TSA)+5% sheep blood agar plated and incubated overnight at 37° C. On day 2, a single colony was selected and re-streaked onto a new TSA+5% sheep blood agar plate and again incubated overnight at 37° C. On day 3, colonies were transferred to a 96-well plate for lysis and genomic DNA was extracted using Beckman Coulter GenFind V2 kit (Indianapolis, Ind., USA). For stool specimens, a 10 μl loop was used to transfer stool to 700 μL 95% ethanol; 204 of this suspension was then used to inoculate a cycloserine cefoxitin fructose agar plate, supplemented with horse blood and taurocholate (CCFA-HT) and incubated for two days at 37° C. On day 3, a single colony was picked from CCFA-HT plate and streaked onto a TSA blood agar plate followed by overnight incubation at 37° C. On day 4, the colonies were transferred to a 96-well plate for lysis and genomic DNA was extracted using the Beckman Coulter GenFind V2 kit.

[0522] Molecular Characterization of the Study Isolates

[0523] For the majority of strains, PCR-ribotyping was performed using the protocol described in Svenungsson et al. For added discrimination, PCR products are analyzed using an Agilent 2100 Bioanalyzer. Ribotype and toxinotype assignments for the toxiontype diversity subset of strains were determined as described in the literature. The nucleotide sequence of adk, atpA, dxr, glyA, recA, sodA and tpi genes was extracted from the whole genome sequence of each strain and used to assign a sequence type (ST) and clade at PubMLST (http://pubmist.org/cdifficile/).

[0524] Preparation of the Illumina Sequencing Library

[0525] C. difficile sequencing libraries were prepared by using either the TruSeq DNA Sample Prep Kits (“TruSeq”) or the Nextera DNA Flex Library Prep Kit (“Flex”), both from Illumina (San Diego, Calif., USA). When using the TruSeq kit, genomic DNAs are first mechanically sheared by a Covaris ME220 (Woburn, Mass., USA) sonication instrument using the settings recommended by the manufacturer. After sonication, the TruSeq universal adapters are added to the ends of the genomic DNA fragments by ligation, followed by bead cleanup, size selection and quantification according to the manufacturer's protocol. When using the Flex kit, genomic DNAs are first tagmented (transposon-mediated fragmentation) and universal adapters are added to the ends of the DNA fragments by PCR, according to the manufacturer's protocol. DNA libraries (paired end, 2×300) were loaded on the Illumina Miseq for whole genome sequencing of the respective C. difficile genomes.

[0526] Analysis of the WGS Data

[0527] Primary C. difficile DNA sequence reads were run through the “Merge Overlapping Pairs” program followed by assembly into contigs using the “De Novo Assembly” program in the Qiagen CLC Genomics Workbench (Redwood City, Calif., USA) using default parameters. The tcdA and tcdB allele sequences were inferred by aligning the assembled contigs to the tcdA and tcdB sequences of the CD630 isolate (Genbank accession AM180355). The deduced amino acid sequences of the genes coding for TcdA and TcdB in CD630 are labeled as TcdA001 and TcdB001, respectively.

[0528] A unique toxin variant is defined as a TcdA or TcdB open reading frame (ORF) that includes all four of the functional domains and whose amino acid sequence differs by at least one amino acid from any other entry. The most challenging region for collection of high-quality DNA sequence was in the C-terminal CROP domain, particularly in the TcdA open reading frame. In some instances, these challenges were addressed by repeat sequencing with fewer input strains to achieve greater depth and/or by performing the de novo assembly program a second time without merging overlapping pairs. If the toxin variant could not be determined by the de novo assembly program, primary sequence data was aligned to the CD630 reference genome to confirm the presence of the gene.

[0529] The nomenclature developed by den Dunnen et al. has been used to describe a series of truncations and in-frame deletions predicted from the tcdA nucleotide sequence of some isolates. In these instances, the TcdA001 sequence is used as the reference when describing position in the ORF. A unique TcdA variant number has been assigned if sequence corresponding to the CROP domain is included in the truncated ORF. However, if the deduced amino acid sequence is truncated prior to the CROP domain, a TcdA variant was not assigned and the isolate has been labeled as ‘truncated at TcdA’. In those isolates where the entire tcdA sequence is missing, the strain has been classified as ‘TcdA deletion’. Acceptance criteria for each novel TcdA or TcdB variant identified required a minimum 35× nucleotide sequence coverage across the respective ORFs with less than 10% sequence heterogeneity. If these acceptance criteria were not met, the isolate was not included in the phylogenomic analysis (this included 26 of the 504 isolates in the collection). TcdA and TcdB amino acid sequences were aligned using CLC Genomics Workbench and aligned sequences were used to construct the phylogenetic tree using the unweighted pair group method with arithmetic mean (UPGMA) with bootstrapping. The phylogenomic figure was created by aligning assembled C. difficile genomes using Parsnp with recombination filtration option enabled. The metadata (clade, ST, ribotype, TcdA variant type and TcdB variant type) was plotted as concentric rings using a custom-built R program.

[0530] Measurement of Toxin Variant Diversity and Distribution within Phylogenetic Clades

[0531] The Simpson's Diversity Index (SDI) was used to quantitatively measure the diversity and distribution of toxin variants within phylogenetic clades of C. difficile. The higher the index obtained, the greater the number and distribution of the toxin variants observed within a clade. Likewise, the lower the index, the fewer number of variants and/or a more restricted distribution of the toxin variants within a clade.

[0532] Results

[0533] Phylogenetic analysis of TcdA and TcdB variants

[0534] Nucleotide sequence corresponding to tcdA and tcdB was extracted from the WGS data and used to generate the deduced amino acid sequence of TcdA and TcdB protein variants, respectively. To serve as a point of reference, the TcdA and TcdB proteins coded for by strain CD630 are variants TcdA001 and TcdB001. A total of 43 unique TcdA variants that differ from variant TcdA001 were identified. All TcdA variants were closely related, with pairwise amino acid sequence identity to TcdA001 that ranged from 98.0% to >99.9%. From the deduced amino acid sequence of TcdA variants, an unrooted phylogenetic tree was constructed using the UPGMA (FIG. 12A). Four clusters of TcdA variants can be identified on the UPGMA tree. TcdA001 is grouped together with 21 other TcdA variants, with each variant sharing >99.7% amino acid sequence identity with TcdA001. Of the TcdA variants whose ORF is at least 2,710 amino acids in length, TcdA013 was the most diverse (98.0% sequence identity with TcdA001). Variant TcdA007 (98.2% sequence identity with TcdA001) formed a cluster with several other full-length variants. Finally, TcdA019 which shares 98.5% identity with TcdA001, is representative of a fourth cluster on the TcdA phylogenetic tree. Most of the sequence variation among the 44 TcdA variants is due to single amino acid substitutions. The greatest amino acid sequence diversity among the TcdA variants is found within the CROP domain of the proteins (Table 8). The tcdA nucleotide sequence of several isolates predict ORFs that are shorter than TcdA001 (summarized in Table 10). A termination codon in the TcdA sequence from 14 isolates occurs following amino acid residue 46 (p.Q47*). While these isolates were collected in different geographic regions, including the US and multiple European countries, each is genotyped as ST37/RT017. The tcdA sequence of three additional isolates also predicted termination codons within the GTD domain of the toxin (p.V57*, p.D108*, p.P196*). A common termination codon (p.G699*) in the APD domain is shared by three isolates. Since the predicted TcdA ORFs of these 20 isolates lack at least 3 of the functional toxin domains, TcdA variants were not assigned. Novel TcdA variants were assigned for 5 isolates whose tcdA sequence predict a deletion of a portion of the CROP domain of the toxin. In-frame deletions of 33 (TcdA050) and 175 amino acids (TcdA051) were detected in two isolates, while three isolates had termination codons in the TcdA CROP domain (TcdA052, TcdA053, TcdA054). Critical catalytic residues within the GTD (D285 and D287) and APD domains (C700) of the toxins are conserved among each of the 44 unique TcdA variants. There were 31 non-toxigenic isolates, lacking any sequence corresponding to TcdA and TcdB (TcdA−/TcdB−). These were not restricted to a single ST or RT. A subset of 3 strains code for a full length TcdB variant, but without any tcdA sequence (TcdA−/TcdB+). These TcdA−/TcdB+ strains were also associated with multiple ribotypes. Precedent for both TcdA−/TcdB+as well as non-toxigenic TcdA−/TcdB− C. difficile strains is well established in the literature. The amino acid sequences of TcdB variants were more diverse than TcdA. Of the 36 variants that differed from TcdB001, pairwise amino acid sequence identity with TcdB001 ranged from 86.1% to >99.9%. This is illustrated in the phylogenetic tree of TcdB variants (FIG. 12B). A cluster of 19 variants group together with TcdB001 (>99.8% pairwise sequence identity). Variants TcdB032 and TcdB038 are the most diverse, sharing 86.1% and 86.2% sequence identity with TcdB001, respectively. TcdB032 is detected in one isolate in the collection (typed as ST62 and RT591) and two isolates code for TcdB038 (ST567 and RT095). While sequence diversity is detected in each of the functional domains of the TcdB toxin, the greatest diversity is found within the GTD domain (Table 8). Unlike TcdB001, eleven of the TcdB variants have a lysine inserted in the GTD domain (p.Val307_Thr308insLys). Based on the structure of the TcdB GTD domain (PDB ID 2BVM, this additional amino acid residue is not predicted to impact the conformation of the GTD domain. The eleven sequence variants that contain the additional amino acid cluster to two groups on the TcdB phylogenetic tree (FIG. 12B). Critical catalytic residues of GTD (D286 and D288) and autoprotease (C698) domains are conserved among all TcdB variants. Although the TcdA and TcdB toxins share similar architectural homology with respect to the functional domains of the molecules, the pairwise amino acid sequence identity between TcdA001 and TcdB001 is only 42%.

[0535] Phylogenomic Analysis and the Association of C. difficile Epidemiological Markers with Toxin Variant Type.

[0536] The 478 C. difficile genomes were assembled to construct a phylogenomic tree using Parsnp. The nucleotide sequence of isolate CD630 was used as the reference genome. Each branch of the dendrogram is representative of a C. difficile isolate. Metadata descriptive of each isolate, including clade, ST, ribotype and toxin variant type, has been added as concentric rings to the circumference of the phylogenomic tree. Included among the 478 isolates are 61 ribotypes and 71 sequence types (STs). Comparative analysis afforded by the figure helps to illustrate that these epidemiological markers are not predictive of toxin variant type. Starting at 12 o'clock on the tree and traveling counterclockwise to 10 o'clock is a cluster of 108 isolates that are typed as ST1 and all code for TcdB variant TcdB002. Although most isolates in this cluster are ribotype 027, other ribotypes such as 003, 014/020, 081, 176, 027/198, and 198 are also identified. Continuing counter-clockwise on the tree is a cluster of 42 isolates that are typed as ST11 and code for TcdB variant TcdB004. Despite sharing considerable phylogenomic, ST and TcdB variant type similarities, the ribotype variability among these isolates is considerable, including ribotypes 045, 078, 126, 078/126 and 413.

[0537] Among the numerous methods that have been developed for molecular typing of C. difficile isolates, ribotype is most commonly cited. Analysis of WGS data in this study illustrates that isolates grouped by ribotype code for sequence-diverse toxin variants (Table 9). Among the 21 isolates that are grouped as ribotype 078/126, genes coding for three TcdA variant types (TcdA013, TcdA015, TcdA046) were identified. The ribotype 078/126 isolates also code for three TcdB variants (TcdB004, TcdB006, TcdB012) whose amino acid sequence identity to TcdB001 ranges from 96.1% to 99.9%. Ribotype 014/020 isolates in the collection code for seven unique TcdA and eight TcdB variants. The pairwise identity of the eight TcdB variants to TcdB001 ranges from 92.2% to 99.9%. These examples illustrate that isolate classification by ribotype is not representative of the diversity of toxin protein sequences. Prediction of the breadth of the functional immune response to a toxin-based vaccine antigen needs to be framed in the context of toxin variant type and not strain ribotype.

[0538] Using ST assignments, all but two of the isolates from this study could be grouped into one of five clades. With the exception of clade 4, the number and distribution of TcdA variants within each of the clades is more diverse than TcdB variants (FIG. 13).

[0539] Discussion

[0540] CDI is a worldwide public health issue and is now the most common healthcare-associated bacterial pathogen. It was estimated that during 2011 there were nearly half a million cases of CDI in the US, associated with approximately 29,000 deaths. Although most patients experiencing a first episode of CDI respond well to standard antibiotic treatment, approximately 15% to 35% of patients suffer from at least one recurrence. Several vaccine strategies for the prevention of CDI have been, or are currently, being evaluated in clinical trials and most of these have focused on the large single subunit glucosylating toxins, TcdA and TcdB as antigens. Clinical proof of concept for the selection of these toxins as C. difficile vaccine antigens has come from studies that were used to support the approval of Bezlotoxumab (ZINPLAVA™, Merck) to reduce the recurrence of CDI in adult patients. Bezlotoxumab is a human monoclonal antibody that binds to a discontinuous epitope located within the CROP domain of TcdB. Since the CROP domain accounts for approximately 20% of the entire protein, a prophylactic vaccine approach able to generate a functional polyclonal response to additional and multiple epitopes across the entire toxin has the potential to prevent primary disease. Three prophylactic vaccines composed of full-length toxin open reading frames, or portions thereof, have been evaluated in clinical studies. A recombinant fusion protein that includes a portion of the TcdA and TcdB CROP domain from a single strain of C. difficile has completed phase 2 testing (NCT02316470). The antigens included in the other investigational vaccines correspond to inactivated full length toxin proteins (i.e., toxoids TxdA and TxdB). Following a planned interim analysis in a phase 3 clinical study for one of the toxoid based vaccines (NCT01887912), the study was discontinued based on the low probability of meeting its primary objective. A bivalent toxoid-based vaccine composed of genetically and chemically inactivated toxoid antigens is in phase 3 clinical development (NCT03918629). Active immunization with these genetically and chemically modified full length versions of TcdA and TcdB has elicited a robust polyclonal antibody response in subjects 65-85 years of age.

[0541] Several molecular methods have been utilized to characterize C. difficile toxin genes for epidemiological analysis of CDI. Two of these, toxinotype and the deduced amino acid sequence of the Receptor Binding Domain (RBD) of TcdB variants, have focused on toxin genotype of C. difficile isolates. However, neither method provides detailed insight into the sequence diversity of the complete open reading frame of the two large toxin proteins. An understanding of the toxin variants expressed by CDI isolates is critically important for an assessment of the breadth of the functional antibody response elicited following immunization with a bivalent toxoid vaccine. Demonstration that the polyclonal immune sera can neutralize the cytotoxicity of sequence diverse toxins is required for an evaluation of vaccine efficacy. The availability of C. difficile WGS data with deep sequence coverage, across the PaLoc in particular, is limited. In a recent study, analysis of WGS data from 906 C. difficile strains focused on questions related to bacterial adaptation for healthcare-mediated transmission, but did not investigate the diversity of the tcdA and tcdB alleles. The WGS of 478 C. difficile isolates have been determined in our study. Acceptance criteria for toxin variant assignment required greater than 35× coverage across both tcdA and tcdB with less than 10% sequence heterogeneity at any nucleotide position for at least one representative isolate. A total of 44 unique TcdA variants and 37 unique TcdB variants were identified, many of which had not previously been reported. The toxin variants with pairwise amino acid sequence identity furthest removed from TcdA001 and TcdB001 were TcdA013 (98% sequence identity) and TcdB032 (86.1% sequence identity), respectively. The ability of the immune response elicited by a toxoid antigen to neutralize the cytotoxicity of sequence diverse toxins remains to be experimentally tested. It should be noted that the origin of the C. difficile isolates evaluated in this study was largely restricted to North America and Europe. The TcdA and TcdB sequences of isolates from different geographic regions may uncover further toxin diversity. In addition, as the isolates collected in this study are not prevalence based the most frequent TcdA and TcdB variant types identified here may not be representative of prevalence among circulating CDI isolates.

[0542] Although both TcdA and TcdB play a role in CDI, several observations suggest that TcdB is the major virulence factor. In both murine and hamster models of C. difficile infection, TcdB was responsible for most of the intestinal damage whereas TcdA caused more superficial and localized damage. It is also worth noting that TcdA+/TcdB− C. difficile strains are extremely rare, whereas TcdA−/TcdB+ strains are not uncommon and have been associated with multiple disease outbreaks. The greater amino acid sequence diversity noted among the 37 TcdB variants compared with the 44 TcdA variants identified in this study could in part be the consequence of host immune pressure applied to the more virulent TcdB toxins.

[0543] Several isolates with deduced amino acid sequences shorter than TcdA001 have been identified in this collection. The majority of these are the product of in-frame stop codons in the glucosyl transferase or auto protease domains and therefore are not likely to code for a functional toxin. TcdA variants with either a deletion or a termination codon within the CROP domain have also been identified. Cell-culture based cytotoxicity assays are required to demonstrate whether these TcdA variants are functional. Previous work by Rupnik and Janezic has indicated that toxinotype VI and VII strains, with deletions in the CROP domain, do produce functional TcdA. It has also been reported that a TcdA mutant lacking the entire CROP domain is cytotoxic, able to enter human cells and cause cytotoxicity, albeit with reduced uptake. Among the isolates evaluated in this study, similar genetic changes in the sequences corresponding to the CROP domain of TcdB variants have not been identified. The larger number and length of repeat units in the TcdA CROP domain may render this locus more prone to genetic rearrangements than TcdB. Differences between the genes coding for the two toxins extend beyond the CROP domain. Examples of toxigenic isolates lacking any sequence coding for TcdA (TcdA−/TcdB+) are included in this collection and have been described in the literature. As noted earlier and despite their close proximity in the PaLoc, examples of TcdA+/TcdB− isolates, lacking tcdB sequences are not common. Our current understanding of the molecular detail of epithelial cell binding and uptake also differentiates the toxins from one another. Taken together, these observations suggest that evolution of the two toxins has been and will continue to be subject to different selection pressures. Relative to the highly conserved TcdA variants, the greater sequence diversity among TcdB variants described in this manuscript is consistent with this hypothesis.

[0544] The same acceptance criteria for deep sequence coverage were applied in the analysis of WGS data corresponding to the genes coding for both subunits of the C. difficile binary toxin. More than half of the isolates (n=292, 61%) in this study did not code for binary toxin (e.g., genotyped as cdtA−/cdtB−). Consistent with literature reports indicating that CDI isolates typed as TcdA−/TcdB−/CDT+ are rare, there were no TcdA−/TcdB−/CDT+ isolates among the isolates evaluated in this study. A study in a hamster model of CDI suggested that vaccination with bivalent TxdA and TxdB antigens did not fully protect from challenge with a TcdA+/TcdB+/CDT+ NAP1 strain and that the addition of binary toxin antigens to the vaccine greatly enhanced protection. Interestingly, human epidemic isolates 027/BI/NAP1 and 078/BK/NAP7 are both positive for binary toxin, whereas the emerging RT106 as well as RT017 isolates common in Asia are negative for binary toxin. The contribution of the binary toxin to clinical CDI remains controversial.

[0545] Based on ST assignments, C. difficile isolates have been grouped into five different clades. Dingle et al. showed that 17 alleles coding for 13 deduced peptide sequences corresponding to the TcdB RBD segregate in parallel with clade assignment. That is, no single RBD allele was found in more than one clade. However, this study focused on just a small section of TcdB and did not capture the full sequence diversity of TcdB variants. In addition, the diversity of TcdA has not been taken into consideration. Using ST assignments from WGS data collected in our study, 476 of the 478 isolates can be placed into one of the 5 clades. Greater than half of the isolates (n=275) are grouped into Clade 1 and these are genotypically diverse, including 49 different STs, 39 ribotypes, 24 TcdA variants and 23 TcdB variants. However, much like the clade-restricted observation for the RBD alleles, none of the 24 TcdA and 23 TcdB variants are coded for by strains other than those grouped to clade 1. The same conclusion can be drawn for strains associated with each clade. For example, while clade 5 strains are fewer in number (n=45) and much less diverse (42 of these are ST11 and each code for TcdB004), all TcdA013 and TcdB004 variants are coded for by strains that are grouped to clade 5. The Simpson's Diversity Index (SDI) analysis indicated that the distribution of TcdA variants within the respective clades is generally more diverse than the variants of TcdB. Although both TcdA and TcdB are co-localized to the PaLoc, the variation in SDI suggested that TcdA and TcdB might have evolved in response to different evolutionary pressures. One interpretation is that point mutations in TcdA are sporadic and equally represented across phylogenetic clades (excluding clade 4 in this collection of strains). The variability noted among TcdB protein sequences can be postulated as the sum of sporadic point mutations together with pressure exerted from additional mechanisms. It is interesting to note that while three distinct cell surface receptors for TcdB have been identified, (PVRL3 (or NECTIN3), CSPG4 and members of the Frizzled protein family), similar molecular binding detail has not been uncovered for TcdA. In fact, none of these receptors bind TcdA. Instead, the CROP domain of TcdA showed high affinity association with glycans, whereas the CROP domain of the TcdB does not bind glycans. The molecular difference in host cell entry mechanisms utilized by TcdA and TcdB may contribute to the variation of SDI noted here.

[0546] To our knowledge, this is the first comprehensive WGS characterization of a large C. difficile isolate collection with a focused analysis of the sequence diversity among TcdA and TcdB toxins. From WGS data, we identified 44 TcdA variants and 37 TcdB variants, many of which were not previously documented. The relative lack of deep WGS data deposited in public databases could be due to technical challenges associated with the sequencing of C. difficile isolates using conventional methods, and in particular sequence determination across repetitive regions of the pathogenicity locus. We observed that neither ribotype nor ST assignment is predictive of the toxin genotype of C. difficile isolates. Specifically, isolates that are grouped together based on ribotype assignment can code for multiple sequence diverse TcdA and TcdB variants. We propose an amended nomenclature that describes both the ribotype and the TcdA and TcdB variant type for the purpose of C. difficile strain surveillance during vaccine efficacy trials. As the immune response to toxoid antigens will be polyclonal and not restricted to the RBD, it is essential that sequence diversity of the entire toxin proteins be considered in efforts to estimate vaccine efficacy. While challenges are associated with obtaining deep sequence coverage across the pathogenicity locus, WGS should be applied for C. difficile isolate typing together with ribotype determination to better guide C. difficile epidemiological studies and to help evaluate immunological approaches for the prevention of C. difficile disease.

TABLE 7
C. difficile isolates included in this study.

| | | | | Number |
|---|---|---|---|---|
| | Collecction | | Molecular | of |
| Collection Name | Year | Geographic Origin | Typing | Isolates |
| Legacy North America | 2004-2009 | USA, Canada | Ribotype, | 24 |
| | | | WGS | |
| Legacy UK | <2011 | UK | Ribotype, | 26 |
| | | | WGS | |
| Antimicrobial Testing | 2009-2017 | Belgium, Czech Republic, | Ribotype, | 303 |
| Leadership and | | France, Germany, Hungary, | WGS | |
| Surveillance (ATLAS) | | Spain, Sweden | | |
| Toxinotype diversity subset | 2009-2016 | Australia, Belgium, Germany, | Ribotype, | 64 |
| | | Slovenia, Spain, UK | Toxinotype, | |
| | | | WGS | |
| US contemporary | 2015-2018 | USA | Ribotype, | 87 |
| | | | WGS | |

TABLE 8
Pairwise amino acid sequence identity (%) of a subset of diverse TcdA and
TcdB variants to TcdA001 and TcdB001, respectively.

| TcdA | Entire | Glucosyl | Auto | Cell | Binding |
|---|---|---|---|---|---|
| Variant | Protein | Transferase | Protease | Entry | (CROP) |
| TcdA013 | 98.0 | 99.5 | 99.2 | 98.6 | 96.1 |
| TcdA007 | 98.2 | 99.5 | 99.6 | 98.6 | 96.5 |
| TcdA020 | 98.2 | 99.5 | 99.6 | 98.8 | 96.3 |
| TcdA019 | 98.5 | 99.6 | 99.2 | 99.0 | 96.8 |
| TcdA014 | 99.7 | 100 | 100 | 99.6 | 99.7 |
| TcdB | Entire | Glucosyl | Auto | Cell | Binding |
| Variant | Protein | Transferase | Protease | Entry | (CROP) |
| TcdB032 | 86.1 | 79.2 | 90.2 | 87.9 | 87.6 |
| TcdB011 | 87.0 | 79.4 | 90.2 | 89.4 | 88.4 |
| TcdB019 | 88.4 | 79.2 | 90.6 | 91.7 | 90.4 |
| TcdB002 | 92.2 | 96.5 | 97.3 | 90.6 | 88.4 |
| TcdB003 | 93.7 | 79.0 | 90.6 | 99.2 | 99.4 |
| TcdB015 | 99.8 | 100 | 100 | 99.9 | 99.4 |

TABLE 9
C difficile isolates grouped by ribotype can code for multiple and
sequence diverse TcdA and TcdB variants.

| Ribotype | TcdA variants | TcdB variants |
|---|---|---|
| 027 (96) | 002 (3), 007 (81), 018 (1), 023 | 002 (92), 008 (3), 010 (1) |
| | (1), 048 (8), 050 (1), 052 (1) | |
| 001 (40) | 010 (35), 014 (1), 015 (1), 018 | 001 (1), 012 (35), 021 (1), |
| | (1) | 036 (1) |
| 078 (11) | 013 (11) | 004 (11) |
| 002 (21) | 010 (21) | 012 (21) |
| 003 (7) | 007 (1), 018 (5), 022 (1) | 001 (1), 002 (1), 010 (3) |
| 013 (6) | 009 (1), 010 (1), 014 (3), 025 | 008 (1), 012 (1), 013 (1), |
| | (1) | 021 (3) |
| 053 (8) | 001 (1), 012 (5), 039 (1) | 001 (2), 008 (5) |
| 056 (21) | 003 (4), 008 (2), 011 (11), 014 | 008 (2), 012 (5), 015 (12), |
| | (1), 042 (1) | 026 (1), 037 (1) |
| 070 (5) | 015 (5) | 012 (5) |
| 106 (16) | 002 (14), 010 (1), 024 (1) | 009 (13), 023 (1), 024 (1), |
| | | 042 (1) |
| 126 (10) | 013 (10) | 004 (10) |
| 258 (2) | 010 (1), 011 (1) | 015 (1), 026 (1) |
| 078/126 (21) | 013 (18), 015 (2), 046 (1) | 004 (18), 006 (1), 012 (2) |
| 014/020 (52) | 003 (4), 005 (2), 007 (1), 009 | 001 (4), 002 (1), 007 (4), |
| | (1), 010 (41), 015 (1), 043 (1) | 008 (3), 012 (36), 014 (1), |
| | | 028 (1), 039 (1) |
| 018/356 (13) | 002 (7), 010 (2), 017 (4) | 009 (7), 012 (2), 016 (4) |

TABLE 10
C difficile isolates with atypical TcdA sequence characteristics.

| | | | | TcdA | Descriptive | TcdB |
|---|---|---|---|---|---|---|
| Isolate ID | Clade | ST | Ribotype | Assignment | Nomenclature | Variant |
| PFECD0010 | 4 | 37 | 017 | truncated | p.Q47* | TcdB003 |
| PFECD0009 | 4 | 37 | 017 | truncated | p.Q47* | TcdB003 |
| PFECD0083 | 4 | 37 | 017 | truncated | p.Q47* | TcdB003 |
| PFECD0086 | 4 | 37 | 017 | truncated | p.Q47* | TcdB003 |
| PFECD0090 | 4 | 37 | 017 | truncated | p.Q47* | TcdB003 |
| PFECD0093 | 4 | 37 | 017 | truncated | p.Q47* | TcdB003 |
| PFECD0099 | 4 | 37 | 017 | truncated | p.Q47* | TcdB003 |
| PFECD0243 | 4 | 37 | 017 | truncated | p.Q47* | TcdB003 |
| PFECD0269 | 4 | 37 | 017 | truncated | p.Q47* | TcdB003 |
| PFECD0275 | 4 | 37 | 017 | truncated | p.Q47* | TcdB003 |
| PFECD0342 | 4 | 37 | 017 | truncated | p.Q47* | TcdB003 |
| PFECD0349 | 4 | 37 | 017 | truncated | p.Q47* | TcdB003 |
| PFECD0391 | 4 | 37 | 017 | truncated | p.Q47* | TcdB003 |
| PFECD0396 | 4 | 37 | 017 | truncated | p.Q47* | TcdB003 |
| PFECD0292 | 2 | 1 | 176 | truncated | p.V57* | TcdB002 |
| PFECD0300 | 4 | 37 | 017 | truncated | p.D108* | TcdB003 |
| PFECD0106 | 5 | 11 | 045 | truncated | p.P196* | TcdB004 |
| PFECD0140 | 2 | 62 | 591 | truncated | p.G699* | TcdB032 |
| PFECD0187 | 2 | 567 | 095 | truncated | p.G699* | TcdB038 |
| PFECD0192 | 2 | 567 | 095 | truncated | p.G699* | TcdB038 |
| PFECD0186 | 2 | 1 | 027 | TcdA050 | p.Va12163_Leu2195del | TcdB002 |
| PFECD0234 | 5 | 11 | 413 | TcdA051 | p.Va12211_Phe2385del | TcdB004 |
| PFECD0523 | 2 | 1 | 027 | TcdA052 | p.Y2172* | TcdB002 |
| PFECD0111 | 5 | 11 | 045 | TcdA053 | p.Y2172* | TcdB004 |
| PFECD0203 | 1 | 3 | 023 | TcdA054 | p.G2327* | TcdB041 |

[0547] The following clauses describe additional embodiments of the invention:
[0548] C1. A polypeptide comprising the amino acid sequence selected from the group consisting of SEQ ID NOs: 763-800, wherein the polypeptide comprises a sequence less than 100% identical to SEQ ID NO: 762.
[0549] C2. The polypeptide according to clause C1, wherein the polypeptide comprises a mutation.
[0550] C3. The polypeptide according to clause C1, wherein the polypeptide comprises three mutations.
[0551] C4. The polypeptide according to clause C1, wherein the polypeptide comprises at least one amino acid side chain chemically modified by 1-ethyl-3-(3-dimethylaminopropyl) carbodiimide) (EDC).
[0552] C5. The polypeptide according to clause C1, wherein the polypeptide comprises at least one amino acid side chain chemically modified by N-Hydroxysuccinimide (NHS).
[0553] C6. A polypeptide comprising the amino acid sequence selected from the group consisting of SEQ ID NOs: 802-840, wherein the polypeptide comprises a sequence less than 100% identical to SEQ ID NO: 801.
[0554] C7. The polypeptide according to clause C6, wherein the polypeptide comprises a mutation.
[0555] C8. The polypeptide according to clause C6, wherein the polypeptide comprises three mutations.
[0556] C9. The polypeptide according to clause C6, wherein the polypeptide comprises at least one amino acid side chain chemically modified by 1-ethyl-3-(3-dimethylaminopropyl) carbodiimide) (EDC).
[0557] C10. The polypeptide according to clause C6, wherein the polypeptide comprises at least one amino acid side chain chemically modified by N-Hydroxysuccinimide (NHS).
[0558] C11. A polypeptide comprising any one amino acid sequence selected from the group consisting of SEQ ID NOs: 842-870, and a mutation as compared to the corresponding wild-type toxin.
[0559] C12. The polypeptide according to clause C11, wherein the polypeptide comprises at least one amino acid side chain chemically modified by 1-ethyl-3-(3-dimethylaminopropyl) carbodiimide) (EDC).
[0560] C13. The polypeptide according to clause C11, wherein the polypeptide comprises at least one amino acid side chain chemically modified by N-Hydroxysuccinimide (NHS).
[0561] C14. A polypeptide comprising any one amino acid sequence selected from the group consisting of SEQ ID NOs: 871-887, and a mutation as compared to the corresponding wild-type toxin.
[0562] C15. The polypeptide according to clause C14, wherein the polypeptide comprises at least one amino acid side chain chemically modified by 1-ethyl-3-(3-dimethylaminopropyl) carbodiimide) (EDC).
[0563] C16. The polypeptide according to clause C14, wherein the polypeptide comprises at least one amino acid side chain chemically modified by N-Hydroxysuccinimide (NHS).
[0564] C17. A composition comprising a polypeptide according to any one of clauses C1-C16;

[0565] and a pharmaceutically acceptable diluent.
[0566] C18. The composition according to clause C17, further comprising an adjuvant.
[0567] C19. The composition according to clause C17, further comprising aluminum hydroxide.
[0568] C20. The composition according to clause C17, further comprising a CpG oligonucleotide.
[0569] C21. The composition according to clause C17, further comprising aluminum hydroxide and a CpG oligonucleotide.
[0570] C22. An antibody or antigen binding fragment thereof comprising the amino acid sequence set forth in SEQ ID NO: 841.
[0571] C23. A method for eliciting an immune response in a human against Clostridium difficile expressing a toxin comprising the amino acid sequence selected from the group consisting of SEQ ID NOs: 762-840, the method comprising administering to the human an effective dose of a composition comprising a C. difficile toxoid.
[0572] C24. The method according to clause C23, comprising administering two doses of the composition to the human.
[0573] C25. The method according to clause C23, wherein the first dose and the second dose are administered about 30 days apart.
[0574] C26. The method according to clause C24, wherein the first dose and the second dose are administered about 6 months apart.
[0575] C27. The method according to clause C23, comprising administering three doses of the composition to the human.
[0576] C28. The method according to clause C27, wherein the third dose is administered about 6 months after the first dose.
[0577] C29. The method according to clause C23, wherein the human is at least 50 years of age.
[0578] C30. The method according to clause C23, wherein the composition comprises a C. difficile toxoid A and a C. difficile toxoid B, each having a purity of at least 90% or greater.
[0579] C31. The method according to clause C23, wherein the composition comprises a C. difficile toxoid A and a C. difficile toxoid B, in a ratio of about 3:1 to about 1:1.
[0580] C32. The method according to clause C23, wherein the composition comprises a C. difficile toxoid A and a C. difficile toxoid B, in a ratio of 1:1.
[0581] C33. The method according to clause C23, wherein the composition comprises an adjuvant.
[0582] C34. The method according to clause C23, wherein the composition comprises an aluminum adjuvant.
[0583] C35. A method for eliciting an immune response in a human against Clostridium difficile, the method comprising administering to the human an effective dose of a composition comprising a C. difficile toxoid, wherein the human had a human healthcare contact in 12 months prior to administration of the composition.
[0584] C36. The method according to clause C35, wherein the composition comprises a polypeptide having the amino acid sequence set forth in any one of SEQ ID NOs: 1-8, 15, 17, 19, 21, 23, 25, 28-35, 82-761, and 762-840.
[0585] C37. A method for eliciting an immune response in a human against Clostridium difficile, the method comprising administering to the human an effective dose of a composition comprising a C. difficile toxoid, wherein the human received an antibiotic within 12 weeks prior to administration of the composition.
[0586] C38. The method according to clause C37, wherein the composition comprises a polypeptide having the amino acid sequence set forth in any one of SEQ ID NOs: 1-8, 15, 17, 19, 21, 23, 25, 28-35, 82-761, and 762-840.
[0587] C39. A method for eliciting an immune response in a human against Clostridium difficile, the method comprising administering to the human an effective dose of a composition comprising a C. difficile toxoid, wherein the human is 50 years of age at the time of administration of the composition.
[0588] C40. The method according to clause C39, wherein the composition comprises a polypeptide having the amino acid sequence set forth in any one of SEQ ID NOs: 1-8, 15, 17, 19, 21, 23, 25, 28-35, 82-761, and 762-840.

What is claimed is:

1. A method for eliciting an immune response in a human against Clostridium difficile expressing a toxin comprising the amino acid sequence selected from the group consisting of SEQ ID NOs: 762-840, the method comprising administering to the human a composition comprising a C. difficile toxoid and a pharmaceutically acceptable diluent.

2. The method according to claim 15, wherein the toxoid comprises a polypeptide comprising any one amino acid sequence selected from SEQ ID NO: 1-8, 15, 17, 19, 21, 23, 25, 28-35, 82-761, and 762-840.

3. The method according to claim 1, further comprising a sugar alcohol.

4. The method according to claim 1, further comprising sucrose.

5. The method according to claim 1, further comprising trehalose.

6. The method according to claim 1, further comprising a buffer.

7. The method according to claim 1, further comprising a surfactant.

8. The method according to claim 1, further comprising polysorbate-80.

9. The method according to claim 1, further comprising an adjuvant.

10. The method according to claim 1, further comprising aluminum hydroxide.

11. The method according to claim 1, further comprising a CpG oligonucleotide.

12. The method according to claim 1, further comprising aluminum hydroxide and a CpG oligonucleotide.

13. The method according to claim 1, further comprising QS-21.

14. The method according to claim 1, wherein the polypeptide is lyophilized.

15. The method according to claim 1, wherein the polypeptide comprises at least one chemically modified amino acid side chain.

16. The method according to claim 1, wherein the polypeptide comprises at least one amino acid side chain chemically modified by 1-ethyl-3-(3-dimethylaminopropyl) carbodiimide) (EDC).

17. The method according to claim 1, wherein the polypeptide comprises at least one amino acid side chain chemically modified by N-Hydroxysuccinimide (NHS).

18. The method according to claim 1, wherein the method comprises administering two doses of the composition.

19. The method according to claim 18, wherein the second dose is administered about 30 days after the first dose.

20. A polypeptide comprising the amino acid sequence selected from the group consisting of SEQ ID NOs: 763-800, wherein the polypeptide comprises a sequence less than 100% identical to SEQ ID NO: 762, wherein the polypeptide comprises at least one chemically modified amino acid side chain.

21. The polypeptide according to claim 20, wherein the polypeptide comprises at least one amino acid side chain chemically modified by 1-ethyl-3-(3-dimethylaminopropyl) carbodiimide) (EDC), and at least one amino acid side chain chemically modified by N-Hydroxysuccinimide (NHS).

22. The polypeptide according to claim 20, wherein the polypeptide comprises any one amino acid sequence selected from the group consisting of SEQ ID NOs: 842-870.

23. A polypeptide comprising the amino acid sequence selected from the group consisting of SEQ ID NOs: 802-840, wherein the polypeptide comprises a sequence less than 100% identical to SEQ ID NO: 801, wherein the polypeptide comprises at least one amino acid side chain chemically modified by 1-ethyl-3-(3-dimethylaminopropyl) carbodiimide) (EDC), and at least one amino acid side chain chemically modified by N-Hydroxysuccinimide (NHS), wherein the polypeptide comprises any one amino acid sequence selected from the group consisting of SEQ ID NOs: 871-887.

24. A composition comprising a polypeptide according to any one of claims 20-23; and a pharmaceutically acceptable diluent.

25. The composition according to claim 24, further comprising a sugar alcohol.

26. The composition according to claim 24, further comprising polysorbate-80.

27. The composition according to claim 24, further comprising QS-21.

28. The composition according to claim 24, wherein the polypeptide is lyophilized.

29. An antibody or antigen binding fragment thereof comprising the amino acid sequence set forth in SEQ ID NO: 841.

The application's sequence listing, which the Patent Office published only in electronic form, follows.

SEQUENCE LISTING (887 sequences)

SEQ ID NO: 1 - protein, 2709 aa, Clostridium difficile
SLISKEELIKLAYSIRPRENEYKTILTNLDEYNKLTTNNNENKYLQLKKLNESIDVFMNKYKTSSRNRALSNLKKDILKEVILIKNSNTSPVEKNLHFVWIGGEVSDIALEYIKQWADINAEYNIKLWYDSEAFLVNTLKKAIVESSTTEALQLLEEEIQNPQFDNMKFYKKRMEFIYDRQKRFINYYKSQINKPTVPTIDDIIKSHLVSEYNRDETVLESYRTNSLRKINSNHGIDIRANSLFTEQELLNIYSQELLNRGNLAAASDIVRLLALKNFGGVYLDVDMLPGIHSDLFKTISRPSSIGLDRWEMIKLEAIMKYKKYINNYTSENFDKLDQQLKDNFKLIIESKSEKSEIFSKLENLNVSDLEIKIAFALGSVINQALISKQGSYLTNLVIEQVKNRYQFLNQHLNPAIESDNNFTDTTKIFHDSLFNSATAENSMFLTKIAPYLQVGFMPEARSTISLSGPGAYASAYYDFINLQENTIEKTLKASDLIEFKFPENNLSQLTEQEINSLWSFDQASAKYQFEKYVRDYTGGSLSEDNGVDFNKNTALDKNYLLNNKIPSNNVEEAGSKNYVHYIIQLQGDDISYEATCNLFSKNPKNSIIIQRNMNESAKSYFLSDDGESILELNKYRIPERLKNKEKVKVTFIGHGKDEFNTSEFARLSVDSLSNEISSFLDTIKLDISPKNVEVNLLGCNMFSYDFNVEETYPGKLLLSIMDKITSTLPDVNKNSITIGANQYEVRINSEGRKELLAHSGKWINKEEAIMSDLSSKEYIFFDSIDNKLKAKSKNIPGLASISEDIKTLLLDASVSPDTKFILNNLKLNIESSIGDYIYYEKLEPVKNIIHNSIDDLIDEFNLLENVSDELYELKKLNNLDEKYLISFEDISKNNSTYSVRFINKSNGESVYVETEKEIFSKYSEHITKEISTIKNSIITDVNGNLLDNIQLDHTSQVNTLNAAFFIQSLIDYSSNKDVLNDLSTSVKVQLYAQLFSTGLNTIYDSIQLVNLISNAVNDTINVLPTITEGIPIVSTILDGINLGAAIKELLDEHDPLLKKELEAKVGVLAINMSLSIAATVASIVGIGAEVTIFLLPIAGISAGIPSLVNNELILHDKATSVVNYFNHLSESKKYGPLKTEDDKILVPIDDLVISEIDFNNNSIKLGTCNILAMEGGSGHTVTGNIDHFFSSPSISSHIPSLSIYSAIGIETENLDFSKKIMMLPNAPSRVFWWETGAVPGLRSLENDGTRLLDSIRDLYPGKFYWRFYAFFDYAITTLKPVYEDTNIKIKLDKDTRNFIMPTITTNEIRNKLSYSFDGAGGTYSLLLSSYPISTNINLSKDDLWIFNIDNEVREISIENGTIKKGKLIKDVLSKIDINKNKLIIGNQTIDFSGDIDNKDRYIFLTCELDDKISLIIEINLVAKSYSLLLSGDKNYLISNLSNIIEKINTLGLDSKNIAYNYTDESNNKYFGAISKTSQKSIIHYKKDSKNILEFYNDSTLEFNSKDFIAEDINVFMKDDINTITGKYYVDNNTDKSIDFSISLVSKNQVKVNGLYLNESVYSSYLDFVKNSDGHHNTSNFMNLFLDNISFWKLFGFENINFVIDKYFTLVGKTNLGYVEFICDNNKNIDIYFGEWKTSSSKSTIFSGNGRNVVVEPIYNPDTGEDISTSLDFSYEPLYGIDRYINKVLIAPDLYTSLININTNYYSNEYYPEIIVLNPNTFHKKVNINLDSSSFEYKWSTEGSDFILVRYLEESNKKILQKIRIKGILSNTQSFNKMSIDFKDIKKLSLGYIMSNFKSFNSENELDRDHLGFKIIDNKTYYYDEDSKLVKGLININNSLFYFDPIEFNLVTGWQTINGKKYYFDINTGAALISYKIINGKHFYFNNDGVMQLGVFKGPDGFEYFAPANTQNNNIEGQAIVYQSKFLTLNGKKYYFDNDSKAVTGWRIINNEKYYFNPNNAIAAVGLQVIDNNKYYFNPDTAIISKGWQTVNGSRYYFDTDTAIAFNGYKTIDGKHFYFDSDCVVKIGVFSTSNGFEYFAPANTYNNNIEGQAIVYQSKFLTLNGKKYYFDNNSKAVTGWQTIDSKKYYFNTNTAEAATGWQTIDGKKYYFNTNTAEAATGWQTIDGKKYYFNTNTAIASTGYTIINGKHFYFNTDGIMQIGVFKGPNGFEYFAPANTDANNIEGQAILYQNEFLTLNGKKYYFGSDSKAVTGWRIINNKKYYFNPNNAIAAIHLCTINNDKYYFSYDGILQNGYITIERNNFYFDANNESKMVTGVFKGPNGFEYFAPANTHNNNIEGQAIVYQNKFLTLNGKKYYFDNDSKAVTGWQTIDGKKYYFNLNTAEAATGWQTIDGKKYYFNLNTAEAATGWQTIDGKKYYFNTNTFIASTGYTSINGKHFYFNTDGIMQIGVFKGPNGFEYFAPANTHNNNIEGQAILYQNKFLTLNGKKYYFGSDSKAVTGLRTIDGKKYYFNTNTAVAVTGWQTINGKKYYFNTNTSIASTGYTIISGKHFYFNTDGIMQIGVFKGPDGFEYFAPANTDANNIEGQAIRYQNRFLYLHDNIYYFGNNSKAATGWVTIDGNRYYFEPNTAMGANGYKTIDNKNFYFRNGLPQIGVFKGSNGFEYFAPANTDANNIEGQAIRYQNRFLHLLGKIYYFGNNSKAVTGWQTINGKVYYFMPDTAMAAAGGLFEIDGVIYFFGVDGVKAPGIYG

SEQ ID NO: 2 - protein, 2366 aa, Clostridium difficile
MSLVNRKQLEKMANVRFRTQEDEYVAILDALEEYHNMSENTVVEKYLKLKDINSLTDIYIDTYKKSGRNKALKKFKEYLVTEVLELKNNNLTPVEKNLHFVWIGGQINDTAINYINQWKDVNSDYNVNVFYDSNAFLINTLKKTVVESAINDTLESFRENLNDPRFDYNKFFRKRMEIIYDKQKNFINYYKAQREENPELIIDDIVKTYLSNEYSKEIDELNTYIEESLNKITQNSGNDVRNFEEFKNGESFNLYEQELVERWNLAAASDILRISALKEIGGMYLDVDMLPGIQPDLFESIEKPSSVTVDFWEMTKLEAIMKYKEYIPEYTSEHFDMLDEEVQSSFESVLASKSDKSEIFSSLGDMEASPLEVKIAFNSKGIINQGLISVKDSYCSNLIVKQIENRYKILNNSLNPAISEDNDFNTTTNTFIDSIMAEANADNGRFMMELGKYLRVGFFPDVKTTINLSGPEAYAAAYQDLLMFKEGSMNIHLIEADLRNFEISKTNISQSTEQEMASLWSFDDARAKAQFEEYKRNYFEGSLGEDDNLDFSQNIVVDKEYLLEKISSLARSSERGYIHYIVQLQGDKISYEAACNLFAKTPYDSVLFQKNIEDSEIAYYYNPGDGEIQEIDKYKIPSIISDRPKIKLTFIGHGKDEFNTDIFAGFDVDSLSTEIEAAIDLAKEDISPKSIEINLLGCNMFSYSINVEETYPGKLLLKVKDKISELMPSISQDSIIVSANQYEVRINSEGRRELLDHSGEWINKEESIIKDISSKEYISFNPKENKITVKSKNLPELSTLLQEIRNNSNSSDIELEEKVMLTECEINVISNIDTQIVEERIEEAKNLTSDSINYIKDEFKLIESISDALCDLKQQNELEDSHFISFEDISETDEGFSIRFINKETGESIFVETEKTIFSEYANHITEEISKIKGTIFDTVNGKLVKKVNLDTTHEVNTLNAAFFIQSLIEYNSSKESLSNLSVAMKVQVYAQLFSTGLNTITDAAKVVELVSTALDETIDLLPTLSEGLPIIATIIDGVSLGAAIKELSETSDPLLRQEIEAKIGIMAVNLTTATTAIITSSLGIASGFSILLVPLAGISAGIPSLVNNELVLRDKATKVVDYFKHVSLVETEGVFTLLDDKIMMPQDDLVISEIDFNNNSIVLGKCEIWRMEGGSGHTVTDDIDHFFSAPSITYREPHLSIYDVLEVQKEELDLSKDLMVLPNAPNRVFAWETGWTPGLRSLENDGTKLLDRIRDNYEGEFYWRYFAFIADALITTLKPRYEDTNIRINLDSNTRSFIVPIITTEYIREKLSYSFYGSGGTYALSLSQYNMGINIELSESDVWIIDVDNVVRDVTIESDKIKKGDLIEGILSTLSIEENKIILNSHEINFSGEVNGSNGFVSLTFSILEGINAIIEVDLLSKSYKLLISGELKILMLNSNHIQQKIDYIGFNSELQKNIPYSFVDSEGKENGFINGSTKEGLFVSELPDVVLISKVYMDDSKPSFGYYSNNLKDVKVITKDNVNILTGYYLKDDIKISLSLTLQDEKTIKLNSVHLDESGVAEILKFMNRKGNTNTSDSLMSFLESMNIKSIFVNFLQSNIKFILDANFIISGTTSIGQFEFICDENDNIQPYFIKFNTLETNYTLYVGNRQNMIVEPNYDLDDSGDISSTVINFSQKYLYGIDSCVNKVVISPNIYTDEINITPVYETNNTYPEVIVLDANYINEKINVNINDLSIRYVWSNDGNDFILMSTSEENKVSQVKIRFVNVFKDKTLANKLSFNFSDKQDVPVSEIILSFTPSYYEDGLIGYDLGLVSLYNEKFYINNFGMMVSGLIYINDSLYYFKPPVNNLITGFVTVGDDKYYFNPINGGAASIGETIIDDKNYYFNQSGVLQTGVFSTEDGFKYFAPANTLDENLEGEAIDFTGKLIIDENIYYFDDNYRGAVEWKELDGEMHYFSPETGKAFKGLNQIGDYKYYFNSDGVMQKGFVSINDNKHYFDDSGVMKVGYTEIDGKHFYFAENGEMQIGVFNTEDGFKYFAHHNEDLGNEEGEEISYSGILNFNNKIYYFDDSFTAVVGWKDLEDGSKYYFDEDTAEAYIGLSLINDGQYYFNDDGIMQVGFVTINDKVFYFSDSGIIESGVQNIDDNYFYIDDNGIVQIGVFDTSDGYKYFAPANTVNDNIYGQAVEYSGLVRVGEDVYYFGETYTIETGWIYDMENESDKYYFNPETKKACKGINLIDDIKYYFDEKGIMRTGLISFENNNYYFNENGEMQFGYINIEDKMFYFGEDGVMQIGVFNTPDGFKYFAHQNTLDENFEGESINYTGWLDLDEKRYYFTDEYIAATGSVIIDGEEYYFDPDTAQLVISE

SEQ ID NO: 3 - protein, 2710 aa, Artificial
  Synthetic amino acid sequence: TcdA (D285A D287A mutations)
MSLISKEELIKLAYSIRPRENEYKTILTNLDEYNKLTTNNNENKYLQLKKLNESIDVFMNKYKTSSRNRALSNLKKDILKEVILIKNSNTSPVEKNLHFVWIGGEVSDIALEYIKQWADINAEYNIKLWYDSEAFLVNTLKKAIVESSTTEALQLLEEEIQNPQFDNMKFYKKRMEFIYDRQKRFINYYKSQINKPTVPTIDDIIKSHLVSEYNRDETVLESYRTNSLRKINSNHGIDIRANSLFTEQELLNIYSQELLNRGNLAAASDIVRLLALKNFGGVYLAVAMLPGIHSDLFKTISRPSSIGLDRWEMIKLEAIMKYKKYINNYTSENFDKLDQQLKDNFKLIIESKSEKSEIFSKLENLNVSDLEIKIAFALGSVINQALISKQGSYLTNLVIEQVKNRYQFLNQHLNPAIESDNNFTDTTKIFHDSLFNSATAENSMFLTKIAPYLQVGFMPEARSTISLSGPGAYASAYYDFINLQENTIEKTLKASDLIEFKFPENNLSQLTEQEINSLWSFDQASAKYQFEKYVRDYTGGSLSEDNGVDFNKNTALDKNYLLNNKIPSNNVEEAGSKNYVHYIIQLQGDDISYEATCNLFSKNPKNSIIIQRNMNESAKSYFLSDDGESILELNKYRIPERLKNKEKVKVTFIGHGKDEFNTSEFARLSVDSLSNEISSFLDTIKLDISPKNVEVNLLGCNMFSYDFNVEETYPGKLLLSIMDKITSTLPDVNKNSITIGANQYEVRINSEGRKELLAHSGKWINKEEAIMSDLSSKEYIFFDSIDNKLKAKSKNIPGLASISEDIKTLLLDASVSPDTKFILNNLKLNIESSIGDYIYYEKLEPVKNIIHNSIDDLIDEFNLLENVSDELYELKKLNNLDEKYLISFEDISKNNSTYSVRFINKSNGESVYVETEKEIFSKYSEHITKEISTIKNSIITDVNGNLLDNIQLDHTSQVNTLNAAFFIQSLIDYSSNKDVLNDLSTSVKVQLYAQLFSTGLNTIYDSIQLVNLISNAVNDTINVLPTITEGIPIVSTILDGINLGAAIKELLDEHDPLLKKELEAKVGVLAINMSLSIAATVASIVGIGAEVTIFLLPIAGISAGIPSLVNNELILHDKATSVVNYFNHLSESKKYGPLKTEDDKILVPIDDLVISEIDFNNNSIKLGTCNILAMEGGSGHTVTGNIDHFFSSPSISSHIPSLSIYSAIGIETENLDFSKKIMMLPNAPSRVFWWETGAVPGLRSLENDGTRLLDSIRDLYPGKFYWRFYAFFDYAITTLKPVYEDTNIKIKLDKDTRNFIMPTITTNEIRNKLSYSFDGAGGTYSLLLSSYPISTNINLSKDDLWIFNIDNEVREISIENGTIKKGKLIKDVLSKIDINKNKLIIGNQTIDFSGDIDNKDRYIFLTCELDDKISLIIEINLVAKSYSLLLSGDKNYLISNLSNIIEKINTLGLDSKNIAYNYTDESNNKYFGAISKTSQKSIIHYKKDSKNILEFYNDSTLEFNSKDFIAEDINVFMKDDINTITGKYYVDNNTDKSIDFSISLVSKNQVKVNGLYLNESVYSSYLDFVKNSDGHHNTSNFMNLFLDNISFWKLFGFENINFVIDKYFTLVGKTNLGYVEFICDNNKNIDIYFGEWKTSSSKSTIFSGNGRNVVVEPIYNPDTGEDISTSLDFSYEPLYGIDRYINKVLIAPDLYTSLININTNYYSNEYYPEIIVLNPNTFHKKVNINLDSSSFEYKWSTEGSDFILVRYLEESNKKILQKIRIKGILSNTQSFNKMSIDFKDIKKLSLGYIMSNFKSFNSENELDRDHLGFKIIDNKTYYYDEDSKLVKGLININNSLFYFDPIEFNLVTGWQTINGKKYYFDINTGAALISYKIINGKHFYFNNDGVMQLGVFKGPDGFEYFAPANTQNNNIEGQAIVYQSKFLTLNGKKYYFDNDSKAVTGWRIINNEKYYFNPNNAIAAVGLQVIDNNKYYFNPDTAIISKGWQTVNGSRYYFDTDTAIAFNGYKTIDGKHFYFDSDCVVKIGVFSTSNGFEYFAPANTYNNNIEGQAIVYQSKFLTLNGKKYYFDNNSKAVTGWQTIDSKKYYFNTNTAEAATGWQTIDGKKYYFNTNTAEAATGWQTIDGKKYYFNTNTAIASTGYTIINGKHFYFNTDGIMQIGVFKGPNGFEYFAPANTDANNIEGQAILYQNEFLTLNGKKYYFGSDSKAVTGWRIINNKKYYFNPNNAIAAIHLCTINNDKYYFSYDGILQNGYITIERNNFYFDANNESKMVTGVFKGPNGFEYFAPANTHNNNIEGQAIVYQNKFLTLNGKKYYFDNDSKAVTGWQTIDGKKYYFNLNTAEAATGWQTIDGKKYYFNLNTAEAATGWQTIDGKKYYFNTNTFIASTGYTSINGKHFYFNTDGIMQIGVFKGPNGFEYFAPANTHNNNIEGQAILYQNKFLTLNGKKYYFGSDSKAVTGLRTIDGKKYYFNTNTAVAVTGWQTINGKKYYFNTNTSIASTGYTIISGKHFYFNTDGIMQIGVFKGPDGFEYFAPANTDANNIEGQAIRYQNRFLYLHDNIYYFGNNSKAATGWVTIDGNRYYFEPNTAMGANGYKTIDNKNFYFRNGLPQIGVFKGSNGFEYFAPANTDANNIEGQAIRYQNRFLHLLGKIYYFGNNSKAVTGWQTINGKVYYFMPDTAMAAAGGLFEIDGVIYFFGVDGVKAPGIYG

SEQ ID NO: 4 - protein, 2710 aa, Artificial
  Synthetic amino acid sequence: TcdA (D285A D287A C700A mutations)
MSLISKEELIKLAYSIRPRENEYKTILTNLDEYNKLTTNNNENKYLQLKKLNESIDVFMNKYKTSSRNRALSNLKKDILKEVILIKNSNTSPVEKNLHFVWIGGEVSDIALEYIKQWADINAEYNIKLWYDSEAFLVNTLKKAIVESSTTEALQLLEEEIQNPQFDNMKFYKKRMEFIYDRQKRFINYYKSQINKPTVPTIDDIIKSHLVSEYNRDETVLESYRTNSLRKINSNHGIDIRANSLFTEQELLNIYSQELLNRGNLAAASDIVRLLALKNFGGVYLAVAMLPGIHSDLFKTISRPSSIGLDRWEMIKLEAIMKYKKYINNYTSENFDKLDQQLKDNFKLIIESKSEKSEIFSKLENLNVSDLEIKIAFALGSVINQALISKQGSYLTNLVIEQVKNRYQFLNQHLNPAIESDNNFTDTTKIFHDSLFNSATAENSMFLTKIAPYLQVGFMPEARSTISLSGPGAYASAYYDFINLQENTIEKTLKASDLIEFKFPENNLSQLTEQEINSLWSFDQASAKYQFEKYVRDYTGGSLSEDNGVDFNKNTALDKNYLLNNKIPSNNVEEAGSKNYVHYIIQLQGDDISYEATCNLFSKNPKNSIIIQRNMNESAKSYFLSDDGESILELNKYRIPERLKNKEKVKVTFIGHGKDEFNTSEFARLSVDSLSNEISSFLDTIKLDISPKNVEVNLLGANMFSYDFNVEETYPGKLLLSIMDKITSTLPDVNKNSITIGANQYEVRINSEGRKELLAHSGKWINKEEAIMSDLSSKEYIFFDSIDNKLKAKSKNIPGLASISEDIKTLLLDASVSPDTKFILNNLKLNIESSIGDYIYYEKLEPVKNIIHNSIDDLIDEFNLLENVSDELYELKKLNNLDEKYLISFEDISKNNSTYSVRFINKSNGESVYVETEKEIFSKYSEHITKEISTIKNSIITDVNGNLLDNIQLDHTSQVNTLNAAFFIQSLIDYSSNKDVLNDLSTSVKVQLYAQLFSTGLNTIYDSIQLVNLISNAVNDTINVLPTITEGIPIVSTILDGINLGAAIKELLDEHDPLLKKELEAKVGVLAINMSLSIAATVASIVGIGAEVTIFLLPIAGISAGIPSLVNNELILHDKATSVVNYFNHLSESKKYGPLKTEDDKILVPIDDLVISEIDFNNNSIKLGTCNILAMEGGSGHTVTGNIDHFFSSPSISSHIPSLSIYSAIGIETENLDFSKKIMMLPNAPSRVFWWETGAVPGLRSLENDGTRLLDSIRDLYPGKFYWRFYAFFDYAITTLKPVYEDTNIKIKLDKDTRNFIMPTITTNEIRNKLSYSFDGAGGTYSLLLSSYPISTNINLSKDDLWIFNIDNEVREISIENGTIKKGKLIKDVLSKIDINKNKLIIGNQTIDFSGDIDNKDRYIFLTCELDDKISLIIEINLVAKSYSLLLSGDKNYLISNLSNIIEKINTLGLDSKNIAYNYTDESNNKYFGAISKTSQKSIIHYKKDSKNILEFYNDSTLEFNSKDFIAEDINVFMKDDINTITGKYYVDNNTDKSIDFSISLVSKNQVKVNGLYLNESVYSSYLDFVKNSDGHHNTSNFMNLFLDNISFWKLFGFENINFVIDKYFTLVGKTNLGYVEFICDNNKNIDIYFGEWKTSSSKSTIFSGNGRNVVVEPIYNPDTGEDISTSLDFSYEPLYGIDRYINKVLIAPDLYTSLININTNYYSNEYYPEIIVLNPNTFHKKVNINLDSSSFEYKWSTEGSDFILVRYLEESNKKILQKIRIKGILSNTQSFNKMSIDFKDIKKLSLGYIMSNFKSFNSENELDRDHLGFKIIDNKTYYYDEDSKLVKGLININNSLFYFDPIEFNLVTGWQTINGKKYYFDINTGAALISYKIINGKHFYFNNDGVMQLGVFKGPDGFEYFAPANTQNNNIEGQAIVYQSKFLTLNGKKYYFDNDSKAVTGWRIINNEKYYFNPNNAIAAVGLQVIDNNKYYFNPDTAIISKGWQTVNGSRYYFDTDTAIAFNGYKTIDGKHFYFDSDCVVKIGVFSTSNGFEYFAPANTYNNNIEGQAIVYQSKFLTLNGKKYYFDNNSKAVTGWQTIDSKKYYFNTNTAEAATGWQTIDGKKYYFNTNTAEAATGWQTIDGKKYYFNTNTAIASTGYTIINGKHFYFNTDGIMQIGVFKGPNGFEYFAPANTDANNIEGQAILYQNEFLTLNGKKYYFGSDSKAVTGWRIINNKKYYFNPNNAIAAIHLCTINNDKYYFSYDGILQNGYITIERNNFYFDANNESKMVTGVFKGPNGFEYFAPANTHNNNIEGQAIVYQNKFLTLNGKKYYFDNDSKAVTGWQTIDGKKYYFNLNTAEAATGWQTIDGKKYYFNLNTAEAATGWQTIDGKKYYFNTNTFIASTGYTSINGKHFYFNTDGIMQIGVFKGPNGFEYFAPANTHNNNIEGQAILYQNKFLTLNGKKYYFGSDSKAVTGLRTIDGKKYYFNTNTAVAVTGWQTINGKKYYFNTNTSIASTGYTIISGKHFYFNTDGIMQIGVFKGPDGFEYFAPANTDANNIEGQAIRYQNRFLYLHDNIYYFGNNSKAATGWVTIDGNRYYFEPNTAMGANGYKTIDNKNFYFRNGLPQIGVFKGSNGFEYFAPANTDANNIEGQAIRYQNRFLHLLGKIYYFGNNSKAVTGWQTINGKVYYFMPDTAMAAAGGLFEIDGVIYFFGVDGVKAPGIYG

SEQ ID NO: 5 - protein, 2366 aa, Artificial
  Synthetic amino acid sequence: TcdB (D286A D288A mutations)
MSLVNRKQLEKMANVRFRTQEDEYVAILDALEEYHNMSENTVVEKYLKLKDINSLTDIYIDTYKKSGRNKALKKFKEYLVTEVLELKNNNLTPVEKNLHFVWIGGQINDTAINYINQWKDVNSDYNVNVFYDSNAFLINTLKKTVVESAINDTLESFRENLNDPRFDYNKFFRKRMEIIYDKQKNFINYYKAQREENPELIIDDIVKTYLSNEYSKEIDELNTYIEESLNKITQNSGNDVRNFEEFKNGESFNLYEQELVERWNLAAASDILRISALKEIGGMYLAVAMLPGIQPDLFESIEKPSSVTVDFWEMTKLEAIMKYKEYIPEYTSEHFDMLDEEVQSSFESVLASKSDKSEIFSSLGDMEASPLEVKIAFNSKGIINQGLISVKDSYCSNLIVKQIENRYKILNNSLNPAISEDNDFNTTTNTFIDSIMAEANADNGRFMMELGKYLRVGFFPDVKTTINLSGPEAYAAAYQDLLMFKEGSMNIHLIEADLRNFEISKTNISQSTEQEMASLWSFDDARAKAQFEEYKRNYFEGSLGEDDNLDFSQNIVVDKEYLLEKISSLARSSERGYIHYIVQLQGDKISYEAACNLFAKTPYDSVLFQKNIEDSEIAYYYNPGDGEIQEIDKYKIPSIISDRPKIKLTFIGHGKDEFNTDIFAGFDVDSLSTEIEAAIDLAKEDISPKSIEINLLGCNMFSYSINVEETYPGKLLLKVKDKISELMPSISQDSIIVSANQYEVRINSEGRRELLDHSGEWINKEESIIKDISSKEYISFNPKENKITVKSKNLPELSTLLQEIRNNSNSSDIELEEKVMLTECEINVISNIDTQIVEERIEEAKNLTSDSINYIKDEFKLIESISDALCDLKQQNELEDSHFISFEDISETDEGFSIRFINKETGESIFVETEKTIFSEYANHITEEISKIKGTIFDTVNGKLVKKVNLDTTHEVNTLNAAFFIQSLIEYNSSKESLSNLSVAMKVQVYAQLFSTGLNTITDAAKVVELVSTALDETIDLLPTLSEGLPIIATIIDGVSLGAAIKELSETSDPLLRQEIEAKIGIMAVNLTTATTAIITSSLGIASGFSILLVPLAGISAGIPSLVNNELVLRDKATKVVDYFKHVSLVETEGVFTLLDDKIMMPQDDLVISEIDFNNNSIVLGKCEIWRMEGGSGHTVTDDIDHFFSAPSITYREPHLSIYDVLEVQKEELDLSKDLMVLPNAPNRVFAWETGWTPGLRSLENDGTKLLDRIRDNYEGEFYWRYFAFIADALITTLKPRYEDTNIRINLDSNTRSFIVPIITTEYIREKLSYSFYGSGGTYALSLSQYNMGINIELSESDVWIIDVDNVVRDVTIESDKIKKGDLIEGILSTLSIEENKIILNSHEINFSGEVNGSNGFVSLTFSILEGINAIIEVDLLSKSYKLLISGELKILMLNSNHIQQKIDYIGFNSELQKNIPYSFVDSEGKENGFINGSTKEGLFVSELPDVVLISKVYMDDSKPSFGYYSNNLKDVKVITKDNVNILTGYYLKDDIKISLSLTLQDEKTIKLNSVHLDESGVAEILKFMNRKGNTNTSDSLMSFLESMNIKSIFVNFLQSNIKFILDANFIISGTTSIGQFEFICDENDNIQPYFIKFNTLETNYTLYVGNRQNMIVEPNYDLDDSGDISSTVINFSQKYLYGIDSCVNKVVISPNIYTDEINITPVYETNNTYPEVIVLDANYINEKINVNINDLSIRYVWSNDGNDFILMSTSEENKVSQVKIRFVNVFKDKTLANKLSFNFSDKQDVPVSEIILSFTPSYYEDGLIGYDLGLVSLYNEKFYINNFGMMVSGLIYINDSLYYFKPPVNNLITGFVTVGDDKYYFNPINGGAASIGETIIDDKNYYFNQSGVLQTGVFSTEDGFKYFAPANTLDENLEGEAIDFTGKLIIDENIYYFDDNYRGAVEWKELDGEMHYFSPETGKAFKGLNQIGDYKYYFNSDGVMQKGFVSINDNKHYFDDSGVMKVGYTEIDGKHFYFAENGEMQIGVFNTEDGFKYFAHHNEDLGNEEGEEISYSGILNFNNKIYYFDDSFTAVVGWKDLEDGSKYYFDEDTAEAYIGLSLINDGQYYFNDDGIMQVGFVTINDKVFYFSDSGIIESGVQNIDDNYFYIDDNGIVQIGVFDTSDGYKYFAPANTVNDNIYGQAVEYSGLVRVGEDVYYFGETYTIETGWIYDMENESDKYYFNPETKKACKGINLIDDIKYYFDEKGIMRTGLISFENNNYYFNENGEMQFGYINIEDKMFYFGEDGVMQIGVFNTPDGFKYFAHQNTLDENFEGESINYTGWLDLDEKRYYFTDEYIAATGSVIIDGEEYYFDPDTAQLVISE

SEQ ID NO: 6 - protein, 2366 aa, Artificial
  Synthetic amino acid sequence: TcdB (D286A D288A C698A mutations)
MSLVNRKQLEKMANVRFRTQEDEYVAILDALEEYHNMSENTVVEKYLKLKDINSLTDIYIDTYKKSGRNKALKKFKEYLVTEVLELKNNNLTPVEKNLHFVWIGGQINDTAINYINQWKDVNSDYNVNVFYDSNAFLINTLKKTVVESAINDTLESFRENLNDPRFDYNKFFRKRMEIIYDKQKNFINYYKAQREENPELIIDDIVKTYLSNEYSKEIDELNTYIEESLNKITQNSGNDVRNFEEFKNGESFNLYEQELVERWNLAAASDILRISALKEIGGMYLAVAMLPGIQPDLFESIEKPSSVTVDFWEMTKLEAIMKYKEYIPEYTSEHFDMLDEEVQSSFESVLASKSDKSEIFSSLGDMEASPLEVKIAFNSKGIINQGLISVKDSYCSNLIVKQIENRYKILNNSLNPAISEDNDFNTTTNTFIDSIMAEANADNGRFMMELGKYLRVGFFPDVKTTINLSGPEAYAAAYQDLLMFKEGSMNIHLIEADLRNFEISKTNISQSTEQEMASLWSFDDARAKAQFEEYKRNYFEGSLGEDDNLDFSQNIVVDKEYLLEKISSLARSSERGYIHYIVQLQGDKISYEAACNLFAKTPYDSVLFQKNIEDSEIAYYYNPGDGEIQEIDKYKIPSIISDRPKIKLTFIGHGKDEFNTDIFAGFDVDSLSTEIEAAIDLAKEDISPKSIEINLLGANMFSYSINVEETYPGKLLLKVKDKISELMPSISQDSIIVSANQYEVRINSEGRRELLDHSGEWINKEESIIKDISSKEYISFNPKENKITVKSKNLPELSTLLQEIRNNSNSSDIELEEKVMLTECEINVISNIDTQIVEERIEEAKNLTSDSINYIKDEFKLIESISDALCDLKQQNELEDSHFISFEDISETDEGFSIRFINKETGESIFVETEKTIFSEYANHITEEISKIKGTIFDTVNGKLVKKVNLDTTHEVNTLNAAFFIQSLIEYNSSKESLSNLSVAMKVQVYAQLFSTGLNTITDAAKVVELVSTALDETIDLLPTLSEGLPIIATIIDGVSLGAAIKELSETSDPLLRQEIEAKIGIMAVNLTTATTAIITSSLGIASGFSILLVPLAGISAGIPSLVNNELVLRDKATKVVDYFKHVSLVETEGVFTLLDDKIMMPQDDLVISEIDFNNNSIVLGKCEIWRMEGGSGHTVTDDIDHFFSAPSITYREPHLSIYDVLEVQKEELDLSKDLMVLPNAPNRVFAWETGWTPGLRSLENDGTKLLDRIRDNYEGEFYWRYFAFIADALITTLKPRYEDTNIRINLDSNTRSFIVPIITTEYIREKLSYSFYGSGGTYALSLSQYNMGINIELSESDVWIIDVDNVVRDVTIESDKIKKGDLIEGILSTLSIEENKIILNSHEINFSGEVNGSNGFVSLTFSILEGINAIIEVDLLSKSYKLLISGELKILMLNSNHIQQKIDYIGFNSELQKNIPYSFVDSEGKENGFINGSTKEGLFVSELPDVVLISKVYMDDSKPSFGYYSNNLKDVKVITKDNVNILTGYYLKDDIKISLSLTLQDEKTIKLNSVHLDESGVAEILKFMNRKGNTNTSDSLMSFLESMNIKSIFVNFLQSNIKFILDANFIISGTTSIGQFEFICDENDNIQPYFIKFNTLETNYTLYVGNRQNMIVEPNYDLDDSGDISSTVINFSQKYLYGIDSCVNKVVISPNIYTDEINITPVYETNNTYPEVIVLDANYINEKINVNINDLSIRYVWSNDGNDFILMSTSEENKVSQVKIRFVNVFKDKTLANKLSFNFSDKQDVPVSEIILSFTPSYYEDGLIGYDLGLVSLYNEKFYINNFGMMVSGLIYINDSLYYFKPPVNNLITGFVTVGDDKYYFNPINGGAASIGETIIDDKNYYFNQSGVLQTGVFSTEDGFKYFAPANTLDENLEGEAIDFTGKLIIDENIYYFDDNYRGAVEWKELDGEMHYFSPETGKAFKGLNQIGDYKYYFNSDGVMQKGFVSINDNKHYFDDSGVMKVGYTEIDGKHFYFAENGEMQIGVFNTEDGFKYFAHHNEDLGNEEGEEISYSGILNFNNKIYYFDDSFTAVVGWKDLEDGSKYYFDEDTAEAYIGLSLINDGQYYFNDDGIMQVGFVTINDKVFYFSDSGIIESGVQNIDDNYFYIDDNGIVQIGVFDTSDGYKYFAPANTVNDNIYGQAVEYSGLVRVGEDVYYFGETYTIETGWIYDMENESDKYYFNPETKKACKGINLIDDIKYYFDEKGIMRTGLISFENNNYYFNENGEMQFGYINIEDKMFYFGEDGVMQIGVFNTPDGFKYFAHQNTLDENFEGESINYTGWLDLDEKRYYFTDEYIAATGSVIIDGEEYYFDPDTAQLVISE

SEQ ID NO: 7 - protein, 2710 aa, Artificial
  Synthetic amino acid sequence: TcdA (D269A, R272A, D285A, D287A, E460A, R462A, and C700A mutations)
MSLISKEELIKLAYSIRPRENEYKTILTNLDEYNKLTTNNNENKYLQLKKLNESIDVFMNKYKTSSRNRALSNLKKDILKEVILIKNSNTSPVEKNLHFVWIGGEVSDIALEYIKQWADINAEYNIKLWYDSEAFLVNTLKKAIVESSTTEALQLLEEEIQNPQFDNMKFYKKRMEFIYDRQKRFINYYKSQINKPTVPTIDDIIKSHLVSEYNRDETVLESYRTNSLRKINSNHGIDIRANSLFTEQELLNIYSQELLNRGNLAAASAIVALLALKNFGGVYLAVAMLPGIHSDLFKTISRPSSIGLDRWEMIKLEAIMKYKKYINNYTSENFDKLDQQLKDNFKLIIESKSEKSEIFSKLENLNVSDLEIKIAFALGSVINQALISKQGSYLTNLVIEQVKNRYQFLNQHLNPAIESDNNFTDTTKIFHDSLFNSATAENSMFLTKIAPYLQVGFMPAAASTISLSGPGAYASAYYDFINLQENTIEKTLKASDLIEFKFPENNLSQLTEQEINSLWSFDQASAKYQFEKYVRDYTGGSLSEDNGVDFNKNTALDKNYLLNNKIPSNNVEEAGSKNYVHYIIQLQGDDISYEATCNLFSKNPKNSIIIQRNMNESAKSYFLSDDGESILELNKYRIPERLKNKEKVKVTFIGHGKDEFNTSEFARLSVDSLSNEISSFLDTIKLDISPKNVEVNLLGANMFSYDFNVEETYPGKLLLSIMDKITSTLPDVNKNSITIGANQYEVRINSEGRKELLAHSGKWINKEEAIMSDLSSKEYIFFDSIDNKLKAKSKNIPGLASISEDIKTLLLDASVSPDTKFILNNLKLNIESSIGDYIYYEKLEPVKNIIHNSIDDLIDEFNLLENVSDELYELKKLNNLDEKYLISFEDISKNNSTYSVRFINKSNGESVYVETEKEIFSKYSEHITKEISTIKNSIITDVNGNLLDNIQLDHTSQVNTLNAAFFIQSLIDYSSNKDVLNDLSTSVKVQLYAQLFSTGLNTIYDSIQLVNLISNAVNDTINVLPTITEGIPIVSTILDGINLGAAIKELLDEHDPLLKKELEAKVGVLAINMSLSIAATVASIVGIGAEVTIFLLPIAGISAGIPSLVNNELILHDKATSVVNYFNHLSESKKYGPLKTEDDKILVPIDDLVISEIDFNNNSIKLGTCNILAMEGGSGHTVTGNIDHFFSSPSISSHIPSLSIYSAIGIETENLDFSKKIMMLPNAPSRVFWWETGAVPGLRSLENDGTRLLDSIRDLYPGKFYWRFYAFFDYAITTLKPVYEDTNIKIKLDKDTRNFIMPTITTNEIRNKLSYSFDGAGGTYSLLLSSYPISTNINLSKDDLWIFNIDNEVREISIENGTIKKGKLIKDVLSKIDINKNKLIIGNQTIDFSGDIDNKDRYIFLTCELDDKISLIIEINLVAKSYSLLLSGDKNYLISNLSNIIEKINTLGLDSKNIAYNYTDESNNKYFGAISKTSQKSIIHYKKDSKNILEFYNDSTLEFNSKDFIAEDINVFMKDDINTITGKYYVDNNTDKSIDFSISLVSKNQVKVNGLYLNESVYSSYLDFVKNSDGHHNTSNFMNLFLDNISFWKLFGFENINFVIDKYFTLVGKTNLGYVEFICDNNKNIDIYFGEWKTSSSKSTIFSGNGRNVVVEPIYNPDTGEDISTSLDFSYEPLYGIDRYINKVLIAPDLYTSLININTNYYSNEYYPEIIVLNPNTFHKKVNINLDSSSFEYKWSTEGSDFILVRYLEESNKKILQKIRIKGILSNTQSFNKMSIDFKDIKKLSLGYIMSNFKSFNSENELDRDHLGFKIIDNKTYYYDEDSKLVKGLININNSLFYFDPIEFNLVTGWQTINGKKYYFDINTGAALISYKIINGKHFYFNNDGVMQLGVFKGPDGFEYFAPANTQNNNIEGQAIVYQSKFLTLNGKKYYFDNDSKAVTGWRIINNEKYYFNPNNAIAAVGLQVIDNNKYYFNPDTAIISKGWQTVNGSRYYFDTDTAIAFNGYKTIDGKHFYFDSDCVVKIGVFSTSNGFEYFAPANTYNNNIEGQAIVYQSKFLTLNGKKYYFDNNSKAVTGWQTIDSKKYYFNTNTAEAATGWQTIDGKKYYFNTNTAEAATGWQTIDGKKYYFNTNTAIASTGYTIINGKHFYFNTDGIMQIGVFKGPNGFEYFAPANTDANNIEGQAILYQNEFLTLNGKKYYFGSDSKAVTGWRIINNKKYYFNPNNAIAAIHLCTINNDKYYFSYDGILQNGYITIERNNFYFDANNESKMVTGVFKGPNGFEYFAPANTHNNNIEGQAIVYQNKFLTLNGKKYYFDNDSKAVTGWQTIDGKKYYFNLNTAEAATGWQTIDGKKYYFNLNTAEAATGWQTIDGKKYYFNTNTFIASTGYTSINGKHFYFNTDGIMQIGVFKGPNGFEYFAPANTHNNNIEGQAILYQNKFLTLNGKKYYFGSDSKAVTGLRTIDGKKYYFNTNTAVAVTGWQTINGKKYYFNTNTSIASTGYTIISGKHFYFNTDGIMQIGVFKGPDGFEYFAPANTDANNIEGQAIRYQNRFLYLHDNIYYFGNNSKAATGWVTIDGNRYYFEPNTAMGANGYKTIDNKNFYFRNGLPQIGVFKGSNGFEYFAPANTDANNIEGQAIRYQNRFLHLLGKIYYFGNNSKAVTGWQTINGKVYYFMPDTAMAAAGGLFEIDGVIYFFGVDGVKAPGIYG

SEQ ID NO: 8 - protein, 2366 aa, Artificial
  Synthetic amino acid sequence: TcdB (D270A, R273A, D286A, D288A, D461A, K463A, and C698A mutations)
MSLVNRKQLEKMANVRFRTQEDEYVAILDALEEYHNMSENTVVEKYLKLKDINSLTDIYIDTYKKSGRNKALKKFKEYLVTEVLELKNNNLTPVEKNLHFVWIGGQINDTAINYINQWKDVNSDYNVNVFYDSNAFLINTLKKTVVESAINDTLESFRENLNDPRFDYNKFFRKRMEIIYDKQKNFINYYKAQREENPELIIDDIVKTYLSNEYSKEIDELNTYIEESLNKITQNSGNDVRNFEEFKNGESFNLYEQELVERWNLAAASAILAISALKEIGGMYLAVAMLPGIQPDLFESIEKPSSVTVDFWEMTKLEAIMKYKEYIPEYTSEHFDMLDEEVQSSFESVLASKSDKSEIFSSLGDMEASPLEVKIAFNSKGIINQGLISVKDSYCSNLIVKQIENRYKILNNSLNPAISEDNDFNTTTNTFIDSIMAEANADNGRFMMELGKYLRVGFFPAVATTINLSGPEAYAAAYQDLLMFKEGSMNIHLIEADLRNFEISKTNISQSTEQEMASLWSFDDARAKAQFEEYKRNYFEGSLGEDDNLDFSQNIVVDKEYLLEKISSLARSSERGYIHYIVQLQGDKISYEAACNLFAKTPYDSVLFQKNIEDSEIAYYYNPGDGEIQEIDKYKIPSIISDRPKIKLTFIGHGKDEFNTDIFAGFDVDSLSTEIEAAIDLAKEDISPKSIEINLLGANMFSYSINVEETYPGKLLLKVKDKISELMPSISQDSIIVSANQYEVRINSEGRRELLDHSGEWINKEESIIKDISSKEYISFNPKENKITVKSKNLPELSTLLQEIRNNSNSSDIELEEKVMLTECEINVISNIDTQIVEERIEEAKNLTSDSINYIKDEFKLIESISDALCDLKQQNELEDSHFISFEDISETDEGFSIRFINKETGESIFVETEKTIFSEYANHITEEISKIKGTIFDTVNGKLVKKVNLDTTHEVNTLNAAFFIQSLIEYNSSKESLSNLSVAMKVQVYAQLFSTGLNTITDAAKVVELVSTALDETIDLLPTLSEGLPIIATIIDGVSLGAAIKELSETSDPLLRQEIEAKIGIMAVNLTTATTAIITSSLGIASGFSILLVPLAGISAGIPSLVNNELVLRDKATKVVDYFKHVSLVETEGVFTLLDDKIMMPQDDLVISEIDFNNNSIVLGKCEIWRMEGGSGHTVTDDIDHFFSAPSITYREPHLSIYDVLEVQKEELDLSKDLMVLPNAPNRVFAWETGWTPGLRSLENDGTKLLDRIRDNYEGEFYWRYFAFIADALITTLKPRYEDTNIRINLDSNTRSFIVPIITTEYIREKLSYSFYGSGGTYALSLSQYNMGINIELSESDVWIIDVDNVVRDVTIESDKIKKGDLIEGILSTLSIEENKIILNSHEINFSGEVNGSNGFVSLTFSILEGINAIIEVDLLSKSYKLLISGELKILMLNSNHIQQKIDYIGFNSELQKNIPYSFVDSEGKENGFINGSTKEGLFVSELPDVVLISKVYMDDSKPSFGYYSNNLKDVKVITKDNVNILTGYYLKDDIKISLSLTLQDEKTIKLNSVHLDESGVAEILKFMNRKGNTNTSDSLMSFLESMNIKSIFVNFLQSNIKFILDANFIISGTTSIGQFEFICDENDNIQPYFIKFNTLETNYTLYVGNRQNMIVEPNYDLDDSGDISSTVINFSQKYLYGIDSCVNKVVISPNIYTDEINITPVYETNNTYPEVIVLDANYINEKINVNINDLSIRYVWSNDGNDFILMSTSEENKVSQVKIRFVNVFKDKTLANKLSFNFSDKQDVPVSEIILSFTPSYYEDGLIGYDLGLVSLYNEKFYINNFGMMVSGLIYINDSLYYFKPPVNNLITGFVTVGDDKYYFNPINGGAASIGETIIDDKNYYFNQSGVLQTGVFSTEDGFKYFAPANTLDENLEGEAIDFTGKLIIDENIYYFDDNYRGAVEWKELDGEMHYFSPETGKAFKGLNQIGDYKYYFNSDGVMQKGFVSINDNKHYFDDSGVMKVGYTEIDGKHFYFAENGEMQIGVFNTEDGFKYFAHHNEDLGNEEGEEISYSGILNFNNKIYYFDDSFTAVVGWKDLEDGSKYYFDEDTAEAYIGLSLINDGQYYFNDDGIMQVGFVTINDKVFYFSDSGIIESGVQNIDDNYFYIDDNGIVQIGVFDTSDGYKYFAPANTVNDNIYGQAVEYSGLVRVGEDVYYFGETYTIETGWIYDMENESDKYYFNPETKKACKGINLIDDIKYYFDEKGIMRTGLISFENNNYYFNENGEMQFGYINIEDKMFYFGEDGVMQIGVFNTPDGFKYFAHQNTLDENFEGESINYTGWLDLDEKRYYFTDEYIAATGSVIIDGEEYYFDPDTAQLVISE

SEQ ID NO: 9 - DNA, 8133 bp, Clostridium difficile
atgtctttaatatctaaagaagagttaataaaactcgcatatagcattagaccaagagaaaatgagtataaaactatactaactaatttagacgaatataataagttaactacaaacaataatgaaaataaatatttacaattaaaaaaactaaatgaatcaattgatgtttttatgaataaatataaaacttcaagcagaaatagagcactctctaatctaaaaaaagatatattaaaagaagtaattcttattaaaaattccaatacaagccctgtagaaaaaaatttacattttgtatggataggtggagaagtcagtgatattgctcttgaatacataaaacaatgggctgatattaatgcagaatataatattaaactgtggtatgatagtgaagcattcttagtaaatacactaaaaaaggctatagttgaatcttctaccactgaagcattacagctactagaggaagagattcaaaatcctcaatttgataatatgaaattttacaaaaaaaggatggaatttatatatgatagacaaaaaaggtttataaattattataaatctcaaatcaataaacctacagtacctacaatagatgatattataaagtctcatctagtatctgaatataatagagatgaaactgtattagaatcatatagaacaaattctttgagaaaaataaatagtaatcatgggatagatatcagggctaatagtttgtttacagaacaagagttattaaatatttatagtcaggagttgttaaatcgtggaaatttagctgcagcatctgacatagtaagattattagccctaaaaaattttggcggagtatatttagatgttgatatgcttccaggtattcactctgatttatttaaaacaatatctagacctagctctattggactagaccgttgggaaatgataaaattagaggctattatgaagtataaaaaatatataaataattatacatcagaaaactttgataaacttgatcaacaattaaaagataattttaaactcattatagaaagtaaaagtgaaaaatctgagatattttctaaattagaaaatttaaatgtatctgatcttgaaattaaaatagctttcgctttaggcagtgttataaatcaagccttgatatcaaaacaaggttcatatcttactaacctagtaatagaacaagtaaaaaatagatatcaatttttaaaccaacaccttaacccagccatagagtctgataataacttcacagatactactaaaatttttcatgattcattatttaattcagctaccgcagaaaactctatgtttttaacaaaaatagcaccatacttacaagtaggttttatgccagaagctcgctccacaataagtttaagtggtccaggagcttatgcgtcagcttactatgatttcataaatttacaagaaaatactatagaaaaaactttaaaagcatcagatttaatagaatttaaattcccagaaaataatctatctcaattgacagaacaagaaataaatagtctatggagctttgatcaagcaagtgcaaaatatcaatttgagaaatatgtaagagattatactggtggatctctttctgaagacaatggggtagactttaataaaaatactgccctcgacaaaaactatttattaaataataaaattccatcaaacaatgtagaagaagctggaagtaaaaattatgttcattatatcatacagttacaaggagatgatataagttatgaagcaacatgcaatttattttctaaaaatcctaaaaatagtattattatacaacgaaatatgaatgaaagtgcaaaaagctactttttaagtgatgatggagaatctattttagaattaaataaatataggatacctgaaagattaaaaaataaggaaaaagtaaaagtaacctttattggacatggtaaagatgaattcaacacaagcgaatttgctagattaagtgtagattcactttccaatgagataagttcatttttagataccataaaattagatatatcacctaaaaatgtagaagtaaacttacttggatgtaatatgtttagttatgattttaatgttgaagaaacttatcctgggaagttgctattaagtattatggacaaaattacttccactttacctgatgtaaataaaaattctattactataggagcaaatcaatatgaagtaagaattaatagtgagggaagaaaagaacttctggctcactcaggtaaatggataaataaagaagaagctattatgagcgatttatctagtaaagaatacattttttttgattctatagataataagctaaaagcaaagtccaagaatattccaggattagcatcaatatcagaagatataaaaacattattacttgatgcaagtgttagtcctgatacaaaatttattttaaataatcttaagcttaatattgaatcttctattggtgattacatttattatgaaaaattagagcctgttaaaaatataattcacaattctatagatgatttaatagatgagttcaatctacttgaaaatgtatctgatgaattatatgaattaaaaaaattaaataatctagatgagaagtatttaatatcttttgaagatatctcaaaaaataattcaacttactctgtaagatttattaacaaaagtaatggtgagtcagtttatgtagaaacagaaaaagaaattttttcaaaatatagcgaacatattacaaaagaaataagtactataaagaatagtataattacagatgttaatggtaatttattggataatatacagttagatcatacttctcaagttaatacattaaacgcagcattctttattcaatcattaatagattatagtagcaataaagatgtactgaatgatttaagtacctcagttaaggttcaactttatgctcaactatttagtacaggtttaaatactatatatgactctatccaattagtaaatttaatatcaaatgcagtaaatgatactataaatgtactacctacaataacagaggggatacctattgtatctactatattagacggaataaacttaggtgcagcaattaaggaattactagacgaacatgacccattactaaaaaaagaattagaagctaaggtgggtgttttagcaataaatatgtcattatctatagctgcaactgtagcttcaattgttggaataggtgctgaagttactattttcttattacctatagctggtatatctgcaggaataccttcattagttaataatgaattaatattgcatgataaggcaacttcagtggtaaactattttaatcatttgtctgaatctaaaaaatatggccctcttaaaacagaagatgataaaattttagttcctattgatgatttagtaatatcagaaatagattttaataataattcgataaaactaggaacatgtaatatattagcaatggaggggggatcaggacacacagtgactggtaatatagatcactttttctcatctccatctataagttctcatattccttcattatcaatttattctgcaataggtatagaaacagaaaatctagatttttcaaaaaaaataatgatgttacctaatgctccttcaagagtgttttggtgggaaactggagcagttccaggtttaagatcattggaaaatgacggaactagattacttgattcaataagagatttatacccaggtaaattttactggagattctatgcttttttcgattatgcaataactacattaaaaccagtttatgaagacactaatattaaaattaaactagataaagatactagaaacttcataatgccaactataactactaacgaaattagaaacaaattatcttattcatttgatggagcaggaggaacttactctttattattatcttcatatccaatatcaacgaatataaatttatctaaagatgatttatggatatttaatattgataatgaagtaagagaaatatctatagaaaatggtactattaaaaaaggaaagttaataaaagatgttttaagtaaaattgatataaataaaaataaacttattataggcaatcaaacaatagatttttcaggcgatatagataataaagatagatatatattcttgacttgtgagttagatgataaaattagtttaataatagaaataaatcttgttgcaaaatcttatagtttgttattgtctggggataaaaattatttgatatccaatttatctaatattattgagaaaatcaatactttaggcctagatagtaaaaatatagcgtacaattacactgatgaatctaataataaatattttggagctatatctaaaacaagtcaaaaaagcataatacattataaaaaagacagtaaaaatatattagaattttataatgacagtacattagaatttaacagtaaagattttattgctgaagatataaatgtatttatgaaagatgatattaatactataacaggaaaatactatgttgataataatactgataaaagtatagatttctctatttctttagttagtaaaaatcaagtaaaagtaaatggattatatttaaatgaatccgtatactcatcttaccttgattttgtgaaaaattcagatggacaccataatacttctaattttatgaatttatttttggacaatataagtttctggaaattgtttgggtttgaaaatataaattttgtaatcgataaatactttacccttgttggtaaaactaatcttggatatgtagaatttatttgtgacaataataaaaatatagatatatattttggtgaatggaaaacatcgtcatctaaaagcactatatttagcggaaatggtagaaatgttgtagtagagcctatatataatcctgatacgggtgaagatatatctacttcactagatttttcctatgaacctctctatggaatagatagatatatcaataaagtattgatagcacctgatttatatacaagtttaataaatattaataccaattattattcaaatgagtactaccctgagattatagttcttaacccaaatacattccacaaaaaagtaaatataaatttagatagttcttcttttgagtataaatggtctacagaaggaagtgactttattttagttagatacttagaagaaagtaataaaaaaatattacaaaaaataagaatcaaaggtatcttatctaatactcaatcatttaataaaatgagtatagattttaaagatattaaaaaactatcattaggatatataatgagtaattttaaatcatttaattctgaaaatgaattagatagagatcatttaggatttaaaataatagataataaaacttattactatgatgaagatagtaaattagttaaaggattaatcaatataaataattcattattctattttgatcctatagaatttaacttagtaactggatggcaaactatcaatggtaaaaaatattattttgatataaatactggagcagctttaattagttataaaattattaatggtaaacacttttattttaataatgatggtgtgatgcagttgggagtatttaaaggacctgatggatttgaatattttgcacctgccaatactcaaaataataacatagaaggtcaggctatagtttatcaaagtaaattcttaactttgaatggcaaaaaatattattttgataatgactcaaaagcagtcactggatggagaattattaacaatgagaaatattactttaatcctaataatgctattgctgcagtcggattgcaagtaattgacaataataagtattatttcaatcctgacactgctatcatctcaaaaggttggcagactgttaatggtagtagatactactttgatactgataccgctattgcctttaatggttataaaactattgatggtaaacacttttattttgatagtgattgtgtagtgaaaataggtgtgtttagtacctctaatggatttgaatattttgcacctgctaatacttataataataacatagaaggtcaggctatagtttatcaaagtaaattcttaactttgaatggtaaaaaatattactttgataataactcaaaagcagttaccggatggcaaactattgatagtaaaaaatattactttaatactaacactgctgaagcagctactggatggcaaactattgatggtaaaaaatattactttaatactaacactgctgaagcagctactggatggcaaactattgatggtaaaaaatattactttaatactaacactgctatagcttcaactggttatacaattattaatggtaaacatttttattttaatactgatggtattatgcagataggagtgtttaaaggacctaatggatttgaatattttgcacctgctaatacggatgctaacaacatagaaggtcaagctatactttaccaaaatgaattcttaactttgaatggtaaaaaatattactttggtagtgactcaaaagcagttactggatggagaattattaacaataagaaatattactttaatcctaataatgctattgctgcaattcatctatgcactataaataatgacaagtattactttagttatgatggaattcttcaaaatggatatattactattgaaagaaataatttctattttgatgctaataatgaatctaaaatggtaacaggagtatttaaaggacctaatggatttgagtattttgcacctgctaatactcacaataataacatagaaggtcaggctatagtttaccagaacaaattcttaactttgaatggcaaaaaatattattttgataatgactcaaaagcagttactggatggcaaaccattgatggtaaaaaatattactttaatcttaacactgctgaagcagctactggatggcaaactattgatggtaaaaaatattactttaatcttaacactgctgaagcagctactggatggcaaactattgatggtaaaaaatattactttaatactaacactttcatagcctcaactggttatacaagtattaatggtaaacatttttattttaatactgatggtattatgcagataggagtgtttaaaggacctaatggatttgaatactttgcacctgctaatactcataataataacatagaaggtcaagctatactttaccaaaataaattcttaactttgaatggtaaaaaatattactttggtagtgactcaaaagcagttaccggattgcgaactattgatggtaaaaaatattactttaatactaacactgctgttgcagttactggatggcaaactattaatggtaaaaaatactactttaatactaacacttctatagcttcaactggttatacaattattagtggtaaacatttttattttaatactgatggtattatgcagataggagtgtttaaaggacctgatggatttgaatactttgcacctgctaatacagatgctaacaatatagaaggtcaagctatacgttatcaaaatagattcctatatttacatgacaatatatattattttggtaataattcaaaagcagctactggttgggtaactattgatggtaatagatattacttcgagcctaatacagctatgggtgcgaatggttataaaactattgataataaaaatttttactttagaaatggtttacctcagataggagtgtttaaagggtctaatggatttgaatactttgcacctgctaatacggatgctaacaatatagaaggtcaagctatacgttatcaaaatagattcctacatttacttggaaaaatatattactttggtaataattcaaaagcagttactggatggcaaactattaatggtaaagtatattactttatgcctgatactgctatggctgcagctggtggacttttcgagattgatggtgttatatatttctttggtgttgatggagtaaaagcccctgggatatatggctaa

SEQ ID NO: 10 - DNA, 7101 bp, Clostridium difficile
atgagtttagttaatagaaaacagttagaaaaaatggcaaatgtaagatttcgtactcaagaagatgaatatgttgcaatattggatgctttagaagaatatcataatatgtcagagaatactgtagtcgaaaaatatttaaaattaaaagatataaatagtttaacagatatttatatagatacatataaaaaatctggtagaaataaagccttaaaaaaatttaaggaatatctagttacagaagtattagagctaaagaataataatttaactccagttgagaaaaatttacattttgtttggattggaggtcaaataaatgacactgctattaattatataaatcaatggaaagatgtaaatagtgattataatgttaatgttttttatgatagtaatgcatttttgataaacacattgaaaaaaactgtagtagaatcagcaataaatgatacacttgaatcatttagagaaaacttaaatgaccctagatttgactataataaattcttcagaaaacgtatggaaataatttatgataaacagaaaaatttcataaactactataaagctcaaagagaagaaaatcctgaacttataattgatgatattgtaaagacatatctttcaaatgagtattcaaaggagatagatgaacttaatacctatattgaagaatccttaaataaaattacacagaatagtggaaatgatgttagaaactttgaagaatttaaaaatggagagtcattcaacttatatgaacaagagttggtagaaaggtggaatttagctgctgcttctgacatattaagaatatctgcattaaaagaaattggtggtatgtatttagatgttgatatgttaccaggaatacaaccagacttatttgagtctatagagaaacctagttcagtaacagtggatttttgggaaatgacaaagttagaagctataatgaaatacaaagaatatataccagaatatacctcagaacattttgacatgttagacgaagaagttcaaagtagttttgaatctgttctagcttctaagtcagataaatcagaaatattctcatcacttggtgatatggaggcatcaccactagaagttaaaattgcatttaatagtaagggtattataaatcaagggctaatttctgtgaaagactcatattgtagcaatttaatagtaaaacaaatcgagaatagatataaaatattgaataatagtttaaatccagctattagcgaggataatgattttaatactacaacgaatacctttattgatagtataatggctgaagctaatgcagataatggtagatttatgatggaactaggaaagtatttaagagttggtttcttcccagatgttaaaactactattaacttaagtggccctgaagcatatgcggcagcttatcaagatttattaatgtttaaagaaggcagtatgaatatccatttgatagaagctgatttaagaaactttgaaatctctaaaactaatatttctcaatcaactgaacaagaaatggctagcttatggtcatttgacgatgcaagagctaaagctcaatttgaagaatataaaaggaattattttgaaggttctcttggtgaagatgataatcttgatttttctcaaaatatagtagttgacaaggagtatcttttagaaaaaatatcttcattagcaagaagttcagagagaggatatatacactatattgttcagttacaaggagataaaattagttatgaagcagcatgtaacttatttgcaaagactccttatgatagtgtactgtttcagaaaaatatagaagattcagaaattgcatattattataatcctggagatggtgaaatacaagaaatagacaagtataaaattccaagtataatttctgatagacctaagattaaattaacatttattggtcatggtaaagatgaatttaatactgatatatttgcaggttttgatgtagattcattatccacagaaatagaagcagcaatagatttagctaaagaggatatttctcctaagtcaatagaaataaatttattaggatgtaatatgtttagctactctatcaacgtagaggagacttatcctggaaaattattacttaaagttaaagataaaatatcagaattaatgccatctataagtcaagactctattatagtaagtgcaaatcaatatgaagttagaataaatagtgaaggaagaagagaattattggatcattctggtgaatggataaataaagaagaaagtattataaaggatatttcatcaaaagaatatatatcatttaatcctaaagaaaataaaattacagtaaaatctaaaaatttacctgagctatctacattattacaagaaattagaaataattctaattcaagtgatattgaactagaagaaaaagtaatgttaacagaatgtgagataaatgttatttcaaatatagatacgcaaattgttgaggaaaggattgaagaagctaagaatttaacttctgactctattaattatataaaagatgaatttaaactaatagaatctatttctgatgcactatgtgacttaaaacaacagaatgaattagaagattctcattttatatcttttgaggacatatcagagactgatgagggatttagtataagatttattaataaagaaactggagaatctatatttgtagaaactgaaaaaacaatattctctgaatatgctaatcatataactgaagagatttctaagataaaaggtactatatttgatactgtaaatggtaagttagtaaaaaaagtaaatttagatactacacacgaagtaaatactttaaatgctgcattttttatacaatcattaatagaatataatagttctaaagaatctcttagtaatttaagtgtagcaatgaaagtccaagtttacgctcaattatttagtactggtttaaatactattacagatgcagccaaagttgttgaattagtatcaactgcattagatgaaactatagacttacttcctacattatctgaaggattacctataattgcaactattatagatggtgtaagtttaggtgcagcaatcaaagagctaagtgaaacgagtgacccattattaagacaagaaatagaagctaagataggtataatggcagtaaatttaacaacagctacaactgcaatcattacttcatctttggggatagctagtggatttagtatacttttagttcctttagcaggaatttcagcaggtataccaagcttagtaaacaatgaacttgtacttcgagataaggcaacaaaggttgtagattattttaaacatgtttcattagttgaaactgaaggagtatttactttattagatgataaaataatgatgccacaagatgatttagtgatatcagaaatagattttaataataattcaatagttttaggtaaatgtgaaatctggagaatggaaggtggttcaggtcatactgtaactgatgatatagatcacttcttttcagcaccatcaataacatatagagagccacacttatctatatatgacgtattggaagtacaaaaagaagaacttgatttgtcaaaagatttaatggtattacctaatgctccaaatagagtatttgcttgggaaacaggatggacaccaggtttaagaagcttagaaaatgatggcacaaaactgttagaccgtataagagataactatgaaggtgagttttattggagatattttgcttttatagctgatgctttaataacaacattaaaaccaagatatgaagatactaatataagaataaatttagatagtaatactagaagttttatagttccaataataactacagaatatataagagaaaaattatcatattctttctatggttcaggaggaacttatgcattgtctctttctcaatataatatgggtataaatatagaattaagtgaaagtgatgtttggattatagatgttgataatgttgtgagagatgtaactatagaatctgataaaattaaaaaaggtgatttaatagaaggtattttatctacactaagtattgaagagaataaaattatcttaaatagccatgagattaatttttctggtgaggtaaatggaagtaatggatttgtttctttaacattttcaattttagaaggaataaatgcaattatagaagttgatttattatctaaatcatataaattacttatttctggcgaattaaaaatattgatgttaaattcaaatcatattcaacagaaaatagattatataggattcaatagcgaattacagaaaaatataccatatagctttgtagatagtgaaggaaaagagaatggttttattaatggttcaacaaaagaaggtttatttgtatctgaattacctgatgtagttcttataagtaaggtttatatggatgatagtaagccttcatttggatattatagtaataatttgaaagatgtcaaagttataactaaagataatgttaatatattaacaggttattatcttaaggatgatataaaaatctctctttctttgactctacaagatgaaaaaactataaagttaaatagtgtgcatttagatgaaagtggagtagctgagattttgaagttcatgaatagaaaaggtaatacaaatacttcagattctttaatgagctttttagaaagtatgaatataaaaagtattttcgttaatttcttacaatctaatattaagtttatattagatgctaattttataataagtggtactacttctattggccaatttgagtttatttgtgatgaaaatgataatatacaaccatatttcattaagtttaatacactagaaactaattatactttatatgtaggaaatagacaaaatatgatagtggaaccaaattatgatttagatgattctggagatatatcttcaactgttatcaatttctctcaaaagtatctttatggaatagacagttgtgttaataaagttgtaatttcaccaaatatttatacagatgaaataaatataacgcctgtatatgaaacaaataatacttatccagaagttattgtattagatgcaaattatataaatgaaaaaataaatgttaatatcaatgatctatctatacgatatgtatggagtaatgatggtaatgattttattcttatgtcaactagtgaagaaaataaggtgtcacaagttaaaataagattcgttaatgtttttaaagataagactttggcaaataagctatcttttaactttagtgataaacaagatgtacctgtaagtgaaataatcttatcatttacaccttcatattatgaggatggattgattggctatgatttgggtctagtttctttatataatgagaaattttatattaataactttggaatgatggtatctggattaatatatattaatgattcattatattattttaaaccaccagtaaataatttgataactggatttgtgactgtaggcgatgataaatactactttaatccaattaatggtggagctgcttcaattggagagacaataattgatgacaaaaattattatttcaaccaaagtggagtgttacaaacaggtgtatttagtacagaagatggatttaaatattttgccccagctaatacacttgatgaaaacctagaaggagaagcaattgattttactggaaaattaattattgacgaaaatatttattattttgatgataattatagaggagctgtagaatggaaagaattagatggtgaaatgcactattttagcccagaaacaggtaaagcttttaaaggtctaaatcaaataggtgattataaatactatttcaattctgatggagttatgcaaaaaggatttgttagtataaatgataataaacactattttgatgattctggtgttatgaaagtaggttacactgaaatagatggcaagcatttctactttgctgaaaacggagaaatgcaaataggagtatttaatacagaagatggatttaaatattttgctcatcataatgaagatttaggaaatgaagaaggtgaagaaatctcatattctggtatattaaatttcaataataaaatttactattttgatgattcatttacagctgtagttggatggaaagatttagaggatggttcaaagtattattttgatgaagatacagcagaagcatatataggtttgtcattaataaatgatggtcaatattattttaatgatgatggaattatgcaagttggatttgtcactataaatgataaagtcttctacttctctgactctggaattatagaatctggagtacaaaacatagatgacaattatttctatatagatgataatggtatagttcaaattggtgtatttgatacttcagatggatataaatattttgcacctgctaatactgtaaatgataatatttacggacaagcagttgaatatagtggtttagttagagttggtgaagatgtatattattttggagaaacatatacaattgagactggatggatatatgatatggaaaatgaaagtgataaatattatttcaatccagaaactaaaaaagcatgcaaaggtattaatttaattgatgatataaaatattattttgatgagaagggcataatgagaacgggtcttatatcatttgaaaataataattattactttaatgagaatggtgaaatgcaatttggttatataaatatagaagataagatgttctattttggtgaagatggtgtcatgcagattggagtatttaatacaccagatggatttaaatactttgcacatcaaaatactttggatgagaattttgagggagaatcaataaactatactggttggttagatttagatgaaaagagatattattttacagatgaatatattgcagcaactggttcagttattattgatggtgaggagtattattttgatcctgatacagctcaattagtgattagtgaatag

SEQ ID NO: 11 - DNA, 8133 bp, Artificial
  Synthetic nucleotide sequence: TcdA gene (D285A D287A mutations)
atgtctttaatatctaaagaagagttaataaaactcgcatatagcattagaccaagagaaaatgagtataaaactatactaactaatttagacgaatataataagttaactacaaacaataatgaaaataaatatttacaattaaaaaaactaaatgaatcaattgatgtttttatgaataaatataaaacttcaagcagaaatagagcactctctaatctaaaaaaagatatattaaaagaagtaattcttattaaaaattccaatacaagccctgtagaaaaaaatttacattttgtatggataggtggagaagtcagtgatattgctcttgaatacataaaacaatgggctgatattaatgcagaatataatattaaactgtggtatgatagtgaagcattcttagtaaatacactaaaaaaggctatagttgaatcttctaccactgaagcattacagctactagaggaagagattcaaaatcctcaatttgataatatgaaattttacaaaaaaaggatggaatttatatatgatagacaaaaaaggtttataaattattataaatctcaaatcaataaacctacagtacctacaatagatgatattataaagtctcatctagtatctgaatataatagagatgaaactgtattagaatcatatagaacaaattctttgagaaaaataaatagtaatcatgggatagatatcagggctaatagtttgtttacagaacaagagttattaaatatttatagtcaggagttgttaaatcgtggaaatttagctgcagcatctgacatagtaagattattagccctaaaaaattttggcggagtatatttagcagttgcaatgcttccaggtattcactctgatttatttaaaacaatatctagacctagctctattggactagaccgttgggaaatgataaaattagaggctattatgaagtataaaaaatatataaataattatacatcagaaaactttgataaacttgatcaacaattaaaagataattttaaactcattatagaaagtaaaagtgaaaaatctgagatattttctaaattagaaaatttaaatgtatctgatcttgaaattaaaatagctttcgctttaggcagtgttataaatcaagccttgatatcaaaacaaggttcatatcttactaacctagtaatagaacaagtaaaaaatagatatcaatttttaaaccaacaccttaacccagccatagagtctgataataacttcacagatactactaaaatttttcatgattcattatttaattcagctaccgcagaaaactctatgtttttaacaaaaatagcaccatacttacaagtaggttttatgccagaagctcgctccacaataagtttaagtggtccaggagcttatgcgtcagcttactatgatttcataaatttacaagaaaatactatagaaaaaactttaaaagcatcagatttaatagaatttaaattcccagaaaataatctatctcaattgacagaacaagaaataaatagtctatggagctttgatcaagcaagtgcaaaatatcaatttgagaaatatgtaagagattatactggtggatctctttctgaagacaatggggtagactttaataaaaatactgccctcgacaaaaactatttattaaataataaaattccatcaaacaatgtagaagaagctggaagtaaaaattatgttcattatatcatacagttacaaggagatgatataagttatgaagcaacatgcaatttattttctaaaaatcctaaaaatagtattattatacaacgaaatatgaatgaaagtgcaaaaagctactttttaagtgatgatggagaatctattttagaattaaataaatataggatacctgaaagattaaaaaataaggaaaaagtaaaagtaacctttattggacatggtaaagatgaattcaacacaagcgaatttgctagattaagtgtagattcactttccaatgagataagttcatttttagataccataaaattagatatatcacctaaaaatgtagaagtaaacttacttggatgtaatatgtttagttatgattttaatgttgaagaaacttatcctgggaagttgctattaagtattatggacaaaattacttccactttacctgatgtaaataaaaattctattactataggagcaaatcaatatgaagtaagaattaatagtgagggaagaaaagaacttctggctcactcaggtaaatggataaataaagaagaagctattatgagcgatttatctagtaaagaatacattttttttgattctatagataataagctaaaagcaaagtccaagaatattccaggattagcatcaatatcagaagatataaaaacattattacttgatgcaagtgttagtcctgatacaaaatttattttaaataatcttaagcttaatattgaatcttctattggtgattacatttattatgaaaaattagagcctgttaaaaatataattcacaattctatagatgatttaatagatgagttcaatctacttgaaaatgtatctgatgaattatatgaattaaaaaaattaaataatctagatgagaagtatttaatatcttttgaagatatctcaaaaaataattcaacttactctgtaagatttattaacaaaagtaatggtgagtcagtttatgtagaaacagaaaaagaaattttttcaaaatatagcgaacatattacaaaagaaataagtactataaagaatagtataattacagatgttaatggtaatttattggataatatacagttagatcatacttctcaagttaatacattaaacgcagcattctttattcaatcattaatagattatagtagcaataaagatgtactgaatgatttaagtacctcagttaaggttcaactttatgctcaactatttagtacaggtttaaatactatatatgactctatccaattagtaaatttaatatcaaatgcagtaaatgatactataaatgtactacctacaataacagaggggatacctattgtatctactatattagacggaataaacttaggtgcagcaattaaggaattactagacgaacatgacccattactaaaaaaagaattagaagctaaggtgggtgttttagcaataaatatgtcattatctatagctgcaactgtagcttcaattgttggaataggtgctgaagttactattttcttattacctatagctggtatatctgcaggaataccttcattagttaataatgaattaatattgcatgataaggcaacttcagtggtaaactattttaatcatttgtctgaatctaaaaaatatggccctcttaaaacagaagatgataaaattttagttcctattgatgatttagtaatatcagaaatagattttaataataattcgataaaactaggaacatgtaatatattagcaatggaggggggatcaggacacacagtgactggtaatatagatcactttttctcatctccatctataagttctcatattccttcattatcaatttattctgcaataggtatagaaacagaaaatctagatttttcaaaaaaaataatgatgttacctaatgctccttcaagagtgttttggtgggaaactggagcagttccaggtttaagatcattggaaaatgacggaactagattacttgattcaataagagatttatacccaggtaaattttactggagattctatgcttttttcgattatgcaataactacattaaaaccagtttatgaagacactaatattaaaattaaactagataaagatactagaaacttcataatgccaactataactactaacgaaattagaaacaaattatcttattcatttgatggagcaggaggaacttactctttattattatcttcatatccaatatcaacgaatataaatttatctaaagatgatttatggatatttaatattgataatgaagtaagagaaatatctatagaaaatggtactattaaaaaaggaaagttaataaaagatgttttaagtaaaattgatataaataaaaataaacttattataggcaatcaaacaatagatttttcaggcgatatagataataaagatagatatatattcttgacttgtgagttagatgataaaattagtttaataatagaaataaatcttgttgcaaaatcttatagtttgttattgtctggggataaaaattatttgatatccaatttatctaatattattgagaaaatcaatactttaggactagatagtaaaaatatagcgtacaattacactgatgaatctaataataaatattttggagctatatctaaaacaagtcaaaaaagcataatacattataaaaaagacagtaaaaatatattagaattttataatgacagtacattagaatttaacagtaaagattttattgctgaagatataaatgtatttatgaaagatgatattaatactataacaggaaaatactatgttgataataatactgataaaagtatagatttctctatttctttagttagtaaaaatcaagtaaaagtaaatggattatatttaaatgaatccgtatactcatcttaccttgattttgtgaaaaattcagatggacaccataatacttctaattttatgaatttatttttggacaatataagtttctggaaattgtttgggtttgaaaatataaattttgtaatcgataaatactttacccttgttggtaaaactaatcttggatatgtagaatttatttgtgacaataataaaaatatagatatatattttggtgaatggaaaacatcgtcatctaaaagcactatatttagcggaaatggtagaaatgttgtagtagagcctatatataatcctgatacgggtgaagatatatctacttcactagatttttcctatgaacctctctatggaatagatagatatatcaataaagtattgatagcacctgatttatatacaagtttaataaatattaataccaattattattcaaatgagtactaccctgagattatagttcttaacccaaatacattccacaaaaaagtaaatataaatttagatagttcttcttttgagtataaatggtctacagaaggaagtgactttattttagttagatacttagaagaaagtaataaaaaaatattacaaaaaataagaatcaaaggtatcttatctaatactcaatcatttaataaaatgagtatagattttaaagatattaaaaaactatcattaggatatataatgagtaattttaaatcatttaattctgaaaatgaattagatagagatcatttaggatttaaaataatagataataaaacttattactatgatgaagatagtaaattagttaaaggattaatcaatataaataattcattattctattttgatcctatagaatttaacttagtaactggatggcaaactatcaatggtaaaaaatattattttgatataaatactggagcagctttaattagttataaaattattaatggtaaacacttttattttaataatgatggtgtgatgcagttgggagtatttaaaggacctgatggatttgaatattttgcacctgccaatactcaaaataataacatagaaggtcaggctatagtttatcaaagtaaattcttaactttgaatggcaaaaaatattattttgataatgactcaaaagcagtcactggatggagaattattaacaatgagaaatattactttaatcctaataatgctattgctgcagtcggattgcaagtaattgacaataataagtattatttcaatcctgacactgctatcatctcaaaaggttggcagactgttaatggtagtagatactactttgatactgataccgctattgcctttaatggttataaaactattgatggtaaacacttttattttgatagtgattgtgtagtgaaaataggtgtgtttagtacctctaatggatttgaatattttgcacctgctaatacttataataataacatagaaggtcaggctatagtttatcaaagtaaattcttaactttgaatggtaaaaaatattactttgataataactcaaaagcagttaccggatggcaaactattgatagtaaaaaatattactttaatactaacactgctgaagcagctactggatggcaaactattgatggtaaaaaatattactttaatactaacactgctgaagcagctactggatggcaaactattgatggtaaaaaatattactttaatactaacactgctatagcttcaactggttatacaattattaatggtaaacatttttattttaatactgatggtattatgcagataggagtgtttaaaggacctaatggatttgaatattttgcacctgctaatacggatgctaacaacatagaaggtcaagctatactttaccaaaatgaattcttaactttgaatggtaaaaaatattactttggtagtgactcaaaagcagttactggatggagaattattaacaataagaaatattactttaatcctaataatgctattgctgcaattcatctatgcactataaataatgacaagtattactttagttatgatggaattcttcaaaatggatatattactattgaaagaaataatttctattttgatgctaataatgaatctaaaatggtaacaggagtatttaaaggacctaatggatttgagtattttgcacctgctaatactcacaataataacatagaaggtcaggctatagtttaccagaacaaattcttaactttgaatggcaaaaaatattattttgataatgactcaaaagcagttactggatggcaaaccattgatggtaaaaaatattactttaatcttaacactgctgaagcagctactggatggcaaactattgatggtaaaaaatattactttaatcttaacactgctgaagcagctactggatggcaaactattgatggtaaaaaatattactttaatactaacactttcatagcctcaactggttatacaagtattaatggtaaacatttttattttaatactgatggtattatgcagataggagtgtttaaaggacctaatggatttgaatactttgcacctgctaatactcataataataacatagaaggtcaagctatactttaccaaaataaattcttaactttgaatggtaaaaaatattactttggtagtgactcaaaagcagttaccggattgcgaactattgatggtaaaaaatattactttaatactaacactgctgttgcagttactggatggcaaactattaatggtaaaaaatactactttaatactaacacttctatagcttcaactggttatacaattattagtggtaaacatttttattttaatactgatggtattatgcagataggagtgtttaaaggacctgatggatttgaatactttgcacctgctaatacagatgctaacaatatagaaggtcaagctatacgttatcaaaatagattcctatatttacatgacaatatatattattttggtaataattcaaaagcagctactggttgggtaactattgatggtaatagatattacttcgagcctaatacagctatgggtgcgaatggttataaaactattgataataaaaatttttactttagaaatggtttacctcagataggagtgtttaaagggtctaatggatttgaatactttgcacctgctaatacggatgctaacaatatagaaggtcaagctatacgttatcaaaatagattcctacatttacttggaaaaatatattactttggtaataattcaaaagcagttactggatggcaaactattaatggtaaagtatattactttatgcctgatactgctatggctgcagcaggtggacttttcgagattgatggtgttatatatttctttggtgttgatggagtaaaagcccctgggatatatggctaa

SEQ ID NO: 12 - DNA, 8133 bp, Artificial
  Synthetic nucleotide sequence: TcdA gene (D285A D287A  C700A mutations)
atgtctttaatatctaaagaagagttaataaaactcgcatatagcattagaccaagagaaaatgagtataaaactatactaactaatttagacgaatataataagttaactacaaacaataatgaaaataaatatttacaattaaaaaaactaaatgaatcaattgatgtttttatgaataaatataaaacttcaagcagaaatagagcactctctaatctaaaaaaagatatattaaaagaagtaattcttattaaaaattccaatacaagccctgtagaaaaaaatttacattttgtatggataggtggagaagtcagtgatattgctcttgaatacataaaacaatgggctgatattaatgcagaatataatattaaactgtggtatgatagtgaagcattcttagtaaatacactaaaaaaggctatagttgaatcttctaccactgaagcattacagctactagaggaagagattcaaaatcctcaatttgataatatgaaattttacaaaaaaaggatggaatttatatatgatagacaaaaaaggtttataaattattataaatctcaaatcaataaacctacagtacctacaatagatgatattataaagtctcatctagtatctgaatataatagagatgaaactgtattagaatcatatagaacaaattctttgagaaaaataaatagtaatcatgggatagatatcagggctaatagtttgtttacagaacaagagttattaaatatttatagtcaggagttgttaaatcgtggaaatttagctgcagcatctgacatagtaagattattagccctaaaaaattttggcggagtatatttagcagttgcaatgcttccaggtattcactctgatttatttaaaacaatatctagacctagctctattggactagaccgttgggaaatgataaaattagaggctattatgaagtataaaaaatatataaataattatacatcagaaaactttgataaacttgatcaacaattaaaagataattttaaactcattatagaaagtaaaagtgaaaaatctgagatattttctaaattagaaaatttaaatgtatctgatcttgaaattaaaatagctttcgctttaggcagtgttataaatcaagccttgatatcaaaacaaggttcatatcttactaacctagtaatagaacaagtaaaaaatagatatcaatttttaaaccaacaccttaacccagccatagagtctgataataacttcacagatactactaaaatttttcatgattcattatttaattcagctaccgcagaaaactctatgtttttaacaaaaatagcaccatacttacaagtaggttttatgccagaagctcgctccacaataagtttaagtggtccaggagcttatgcgtcagcttactatgatttcataaatttacaagaaaatactatagaaaaaactttaaaagcatcagatttaatagaatttaaattcccagaaaataatctatctcaattgacagaacaagaaataaatagtctatggagctttgatcaagcaagtgcaaaatatcaatttgagaaatatgtaagagattatactggtggatctctttctgaagacaatggggtagactttaataaaaatactgccctcgacaaaaactatttattaaataataaaattccatcaaacaatgtagaagaagctggaagtaaaaattatgttcattatatcatacagttacaaggagatgatataagttatgaagcaacatgcaatttattttctaaaaatcctaaaaatagtattattatacaacgaaatatgaatgaaagtgcaaaaagctactttttaagtgatgatggagaatctattttagaattaaataaatataggatacctgaaagattaaaaaataaggaaaaagtaaaagtaacctttattggacatggtaaagatgaattcaacacaagcgaatttgctagattaagtgtagattcactttccaatgagataagttcatttttagataccataaaattagatatatcacctaaaaatgtagaagtaaacttacttggagctaatatgtttagttatgattttaatgttgaagaaacttatcctgggaagttgctattaagtattatggacaaaattacttccactttacctgatgtaaataaaaattctattactataggagcaaatcaatatgaagtaagaattaatagtgagggaagaaaagaacttctggctcactcaggtaaatggataaataaagaagaagctattatgagcgatttatctagtaaagaatacattttttttgattctatagataataagctaaaagcaaagtccaagaatattccaggattagcatcaatatcagaagatataaaaacattattacttgatgcaagtgttagtcctgatacaaaatttattttaaataatcttaagcttaatattgaatcttctattggtgattacatttattatgaaaaattagagcctgttaaaaatataattcacaattctatagatgatttaatagatgagttcaatctacttgaaaatgtatctgatgaattatatgaattaaaaaaattaaataatctagatgagaagtatttaatatcttttgaagatatctcaaaaaataattcaacttactctgtaagatttattaacaaaagtaatggtgagtcagtttatgtagaaacagaaaaagaaattttttcaaaatatagcgaacatattacaaaagaaataagtactataaagaatagtataattacagatgttaatggtaatttattggataatatacagttagatcatacttctcaagttaatacattaaacgcagcattctttattcaatcattaatagattatagtagcaataaagatgtactgaatgatttaagtacctcagttaaggttcaactttatgctcaactatttagtacaggtttaaatactatatatgactctatccaattagtaaatttaatatcaaatgcagtaaatgatactataaatgtactacctacaataacagaggggatacctattgtatctactatattagacggaataaacttaggtgcagcaattaaggaattactagacgaacatgacccattactaaaaaaagaattagaagctaaggtgggtgttttagcaataaatatgtcattatctatagctgcaactgtagcttcaattgttggaataggtgctgaagttactattttcttattacctatagctggtatatctgcaggaataccttcattagttaataatgaattaatattgcatgataaggcaacttcagtggtaaactattttaatcatttgtctgaatctaaaaaatatggccctcttaaaacagaagatgataaaattttagttcctattgatgatttagtaatatcagaaatagattttaataataattcgataaaactaggaacatgtaatatattagcaatggaggggggatcaggacacacagtgactggtaatatagatcactttttctcatctccatctataagttctcatattccttcattatcaatttattctgcaataggtatagaaacagaaaatctagatttttcaaaaaaaataatgatgttacctaatgctccttcaagagtgttttggtgggaaactggagcagttccaggtttaagatcattggaaaatgacggaactagattacttgattcaataagagatttatacccaggtaaattttactggagattctatgcttttttcgattatgcaataactacattaaaaccagtttatgaagacactaatattaaaattaaactagataaagatactagaaacttcataatgccaactataactactaacgaaattagaaacaaattatcttattcatttgatggagcaggaggaacttactctttattattatcttcatatccaatatcaacgaatataaatttatctaaagatgatttatggatatttaatattgataatgaagtaagagaaatatctatagaaaatggtactattaaaaaaggaaagttaataaaagatgttttaagtaaaattgatataaataaaaataaacttattataggcaatcaaacaatagatttttcaggcgatatagataataaagatagatatatattcttgacttgtgagttagatgataaaattagtttaataatagaaataaatcttgttgcaaaatcttatagtttgttattgtctggggataaaaattatttgatatccaatttatctaatattattgagaaaatcaatactttaggactagatagtaaaaatatagcgtacaattacactgatgaatctaataataaatattttggagctatatctaaaacaagtcaaaaaagcataatacattataaaaaagacagtaaaaatatattagaattttataatgacagtacattagaatttaacagtaaagattttattgctgaagatataaatgtatttatgaaagatgatattaatactataacaggaaaatactatgttgataataatactgataaaagtatagatttctctatttctttagttagtaaaaatcaagtaaaagtaaatggattatatttaaatgaatccgtatactcatcttaccttgattttgtgaaaaattcagatggacaccataatacttctaattttatgaatttatttttggacaatataagtttctggaaattgtttgggtttgaaaatataaattttgtaatcgataaatactttacccttgttggtaaaactaatcttggatatgtagaatttatttgtgacaataataaaaatatagatatatattttggtgaatggaaaacatcgtcatctaaaagcactatatttagcggaaatggtagaaatgttgtagtagagcctatatataatcctgatacgggtgaagatatatctacttcactagatttttcctatgaacctctctatggaatagatagatatatcaataaagtattgatagcacctgatttatatacaagtttaataaatattaataccaattattattcaaatgagtactaccctgagattatagttcttaacccaaatacattccacaaaaaagtaaatataaatttagatagttcttcttttgagtataaatggtctacagaaggaagtgactttattttagttagatacttagaagaaagtaataaaaaaatattacaaaaaataagaatcaaaggtatcttatctaatactcaatcatttaataaaatgagtatagattttaaagatattaaaaaactatcattaggatatataatgagtaattttaaatcatttaattctgaaaatgaattagatagagatcatttaggatttaaaataatagataataaaacttattactatgatgaagatagtaaattagttaaaggattaatcaatataaataattcattattctattttgatcctatagaatttaacttagtaactggatggcaaactatcaatggtaaaaaatattattttgatataaatactggagcagctttaattagttataaaattattaatggtaaacacttttattttaataatgatggtgtgatgcagttgggagtatttaaaggacctgatggatttgaatattttgcacctgccaatactcaaaataataacatagaaggtcaggctatagtttatcaaagtaaattcttaactttgaatggcaaaaaatattattttgataatgactcaaaagcagtcactggatggagaattattaacaatgagaaatattactttaatcctaataatgctattgctgcagtcggattgcaagtaattgacaataataagtattatttcaatcctgacactgctatcatctcaaaaggttggcagactgttaatggtagtagatactactttgatactgataccgctattgcctttaatggttataaaactattgatggtaaacacttttattttgatagtgattgtgtagtgaaaataggtgtgtttagtacctctaatggatttgaatattttgcacctgctaatacttataataataacatagaaggtcaggctatagtttatcaaagtaaattcttaactttgaatggtaaaaaatattactttgataataactcaaaagcagttaccggatggcaaactattgatagtaaaaaatattactttaatactaacactgctgaagcagctactggatggcaaactattgatggtaaaaaatattactttaatactaacactgctgaagcagctactggatggcaaactattgatggtaaaaaatattactttaatactaacactgctatagcttcaactggttatacaattattaatggtaaacatttttattttaatactgatggtattatgcagataggagtgtttaaaggacctaatggatttgaatattttgcacctgctaatacggatgctaacaacatagaaggtcaagctatactttaccaaaatgaattcttaactttgaatggtaaaaaatattactttggtagtgactcaaaagcagttactggatggagaattattaacaataagaaatattactttaatcctaataatgctattgctgcaattcatctatgcactataaataatgacaagtattactttagttatgatggaattcttcaaaatggatatattactattgaaagaaataatttctattttgatgctaataatgaatctaaaatggtaacaggagtatttaaaggacctaatggatttgagtattttgcacctgctaatactcacaataataacatagaaggtcaggctatagtttaccagaacaaattcttaactttgaatggcaaaaaatattattttgataatgactcaaaagcagttactggatggcaaaccattgatggtaaaaaatattactttaatcttaacactgctgaagcagctactggatggcaaactattgatggtaaaaaatattactttaatcttaacactgctgaagcagctactggatggcaaactattgatggtaaaaaatattactttaatactaacactttcatagcctcaactggttatacaagtattaatggtaaacatttttattttaatactgatggtattatgcagataggagtgtttaaaggacctaatggatttgaatactttgcacctgctaatactcataataataacatagaaggtcaagctatactttaccaaaataaattcttaactttgaatggtaaaaaatattactttggtagtgactcaaaagcagttaccggattgcgaactattgatggtaaaaaatattactttaatactaacactgctgttgcagttactggatggcaaactattaatggtaaaaaatactactttaatactaacacttctatagcttcaactggttatacaattattagtggtaaacatttttattttaatactgatggtattatgcagataggagtgtttaaaggacctgatggatttgaatactttgcacctgctaatacagatgctaacaatatagaaggtcaagctatacgttatcaaaatagattcctatatttacatgacaatatatattattttggtaataattcaaaagcagctactggttgggtaactattgatggtaatagatattacttcgagcctaatacagctatgggtgcgaatggttataaaactattgataataaaaatttttactttagaaatggtttacctcagataggagtgtttaaagggtctaatggatttgaatactttgcacctgctaatacggatgctaacaatatagaaggtcaagctatacgttatcaaaatagattcctacatttacttggaaaaatatattactttggtaataattcaaaagcagttactggatggcaaactattaatggtaaagtatattactttatgcctgatactgctatggctgcagcaggtggacttttcgagattgatggtgttatatatttctttggtgttgatggagtaaaagcccctgggatatatggctaa

SEQ ID NO: 13 - DNA, 7101 bp, Artificial
  Synthetic nucleotide sequence: TcdB (D286A D288A mutations)
atgagtttagttaatagaaaacagttagaaaaaatggcaaatgtaagatttcgtactcaagaagatgaatatgttgcaatattggatgctttagaagaatatcataatatgtcagagaatactgtagtcgaaaaatatttaaaattaaaagatataaatagtttaacagatatttatatagatacatataaaaaatctggtagaaataaagccttaaaaaaatttaaggaatatctagttacagaagtattagagctaaagaataataatttaactccagttgagaaaaatttacattttgtttggattggaggtcaaataaatgacactgctattaattatataaatcaatggaaagatgtaaatagtgattataatgttaatgttttttatgatagtaatgcatttttgataaacacattgaaaaaaactgtagtagaatcagcaataaatgatacacttgaatcatttagagaaaacttaaatgaccctagatttgactataataaattcttcagaaaacgtatggaaataatttatgataaacagaaaaatttcataaactactataaagctcaaagagaagaaaatcctgaacttataattgatgatattgtaaagacatatctttcaaatgagtattcaaaggagatagatgaacttaatacctatattgaagaatccttaaataaaattacacagaatagtggaaatgatgttagaaactttgaagaatttaaaaatggagagtcattcaacttatatgaacaagagttggtagaaaggtggaatttagctgctgcttctgacatattaagaatatctgcattaaaagaaattggtggtatgtatttagcagttgcaatgttaccaggaatacaaccagacttatttgagtctatagagaaacctagttcagtaacagtggatttttgggaaatgacaaagttagaagctataatgaaatacaaagaatatataccagaatatacctcagaacattttgacatgttagacgaagaagttcaaagtagttttgaatctgttctagcttctaagtcagataaatcagaaatattctcatcacttggtgatatggaggcatcaccactagaagttaaaattgcatttaatagtaagggtattataaatcaagggctaatttctgtgaaagactcatattgtagcaatttaatagtaaaacaaatcgagaatagatataaaatattgaataatagtttaaatccagctattagcgaggataatgattttaatactacaacgaatacctttattgatagtataatggctgaagctaatgcagataatggtagatttatgatggaactaggaaagtatttaagagttggtttcttcccagatgttaaaactactattaacttaagtggccctgaagcttatgcggcagcttatcaagatttattaatgtttaaagaaggcagtatgaatatccatttgatagaagctgatttaagaaactttgaaatctctaaaactaatatttctcaatcaactgaacaagaaatggcttctttatggtcatttgacgatgcaagagctaaagctcaatttgaagaatataaaaggaattattttgaaggttctcttggtgaagatgataatcttgatttttctcaaaatatagtagttgacaaggagtatcttttagaaaaaatatcttcattagcaagaagttcagagagaggatatatacactatattgttcagttacaaggagataaaattagttatgaagcagcatgtaacttatttgcaaagactccttatgatagtgtactgtttcagaaaaatatagaagattcagaaattgcatattattataatcctggagatggtgaaatacaagaaatagacaagtataaaattccaagtataatttctgatagacctaagattaaattaacatttattggtcatggtaaagatgaatttaatactgatatatttgcaggttttgatgtagattcattatccacagaaatagaagcagcaatagatttagctaaagaggatatttctcctaagtcaatagaaataaatttattaggatgtaatatgtttagctactctatcaacgtagaggagacttatcctggaaaattattacttaaagttaaagataaaatatcagaattaatgccatctataagtcaagactctattatagtaagtgcaaatcaatatgaagttagaataaatagtgaaggaagaagagaattattggatcattctggtgaatggataaataaagaagaaagtattataaaggatatttcatcaaaagaatatatatcatttaatcctaaagaaaataaaattacagtaaaatctaaaaatttacctgagctatctacattattacaagaaattagaaataattctaattcaagtgatattgaactagaagaaaaagtaatgttaacagaatgtgagataaatgttatttcaaatatagatacgcaaattgttgaggaaaggattgaagaagctaagaatttaacttctgactctattaattatataaaagatgaatttaaactaatagaatctatttctgatgcactatgtgacttaaaacaacagaatgaattagaagattctcattttatatcttttgaggacatatcagagactgatgagggatttagtataagatttattaataaagaaactggagaatctatatttgtagaaactgaaaaaacaatattctctgaatatgctaatcatataactgaagagatttctaagataaaaggtactatatttgatactgtaaatggtaagttagtaaaaaaagtaaatttagatactacacacgaagtaaatactttaaatgctgcattttttatacaatcattaatagaatataatagttctaaagaatctcttagtaatttaagtgtagcaatgaaagtccaagtttacgctcaattatttagtactggtttaaatactattacagatgcagccaaagttgttgaattagtatcaactgcattagatgaaactatagacttacttcctacattatctgaaggattacctataattgcaactattatagatggtgtaagtttaggtgcagcaatcaaagagctaagtgaaacgagtgacccattattaagacaagaaatagaagctaagataggtataatggcagtaaatttaacaacagctacaactgcaatcattacttcatctttggggatagctagtggatttagtatacttttagttcctttagcaggaatttcagcaggtataccaagcttagtaaacaatgaacttgtacttcgagataaggcaacaaaggttgtagattattttaaacatgtttcattagttgaaactgaaggagtatttactttattagatgataaaataatgatgccacaagatgatttagtgatatcagaaatagattttaataataattcaatagttttaggtaaatgtgaaatctggagaatggaaggtggttcaggtcatactgtaactgatgatatagatcacttcttttcagcaccatcaataacatatagagagccacacttatctatatatgacgtattggaagtacaaaaagaagaacttgatttgtcaaaagatttaatggtattacctaatgctccaaatagagtatttgcttgggaaacaggatggacaccaggtttaagaagcttagaaaatgatggcacaaaactgttagaccgtataagagataactatgaaggtgagttttattggagatattttgcttttatagctgatgctttaataacaacattaaaaccaagatatgaagatactaatataagaataaatttagatagtaatactagaagttttatagttccaataataactacagaatatataagagaaaaattatcatattctttctatggttcaggaggaacttatgcattgtctctttctcaatataatatgggtataaatatagaattaagtgaaagtgatgtttggattatagatgttgataatgttgtgagagatgtaactatagaatctgataaaattaaaaaaggtgatttaatagaaggtattttatctacactaagtattgaagagaataaaattatcttaaatagccatgagattaatttttctggtgaggtaaatggaagtaatggatttgtttctttaacattttcaattttagaaggaataaatgcaattatagaagttgatttattatctaaatcatataaattacttatttctggcgaattaaaaatattgatgttaaattcaaatcatattcaacagaaaatagattatataggattcaatagcgaattacagaaaaatataccatatagctttgtagatagtgaaggaaaagagaatggttttattaatggttcaacaaaagaaggtttatttgtatctgaattacctgatgtagttcttataagtaaggtttatatggatgatagtaagccttcatttggatattatagtaataatttgaaagatgtcaaagttataactaaagataatgttaatatattaacaggttattatcttaaggatgatataaaaatctctctttctttgactctacaagatgaaaaaactataaagttaaatagtgtgcatttagatgaaagtggagtagctgagattttgaagttcatgaatagaaaaggtaatacaaatacttcagattctttaatgagctttttagaaagtatgaatataaaaagtattttcgttaatttcttacaatctaatattaagtttatattagatgctaattttataataagtggtactacttctattggccaatttgagtttatttgtgatgaaaatgataatatacaaccatatttcattaagtttaatacactagaaactaattatactttatatgtaggaaatagacaaaatatgatagtggaaccaaattatgatttagatgattctggagatatatcttcaactgttatcaatttctctcaaaagtatctttatggaatagacagttgtgttaataaagttgtaatttcaccaaatatttatacagatgaaataaatataacgcctgtatatgaaacaaataatacttatccagaagttattgtattagatgcaaattatataaatgaaaaaataaatgttaatatcaatgatctatctatacgatatgtatggagtaatgatggtaatgattttattcttatgtcaactagtgaagaaaataaggtgtcacaagttaaaataagattcgttaatgtttttaaagataagactttggcaaataagctatcttttaactttagtgataaacaagatgtacctgtaagtgaaataatcttatcatttacaccttcatattatgaggatggattgattggctatgatttgggtctagtttctttatataatgagaaattttatattaataactttggaatgatggtatctggattaatatatattaatgattcattatattattttaaaccaccagtaaataatttgataactggatttgtgactgtaggcgatgataaatactactttaatccaattaatggtggagctgcttcaattggagagacaataattgatgacaaaaattattatttcaaccaaagtggagtgttacaaacaggtgtatttagtacagaagatggatttaaatattttgccccagctaatacacttgatgaaaacctagaaggagaagcaattgattttactggaaaattaattattgacgaaaatatttattattttgatgataattatagaggagctgtagaatggaaagaattagatggtgaaatgcactattttagcccagaaacaggtaaagcttttaaaggtctaaatcaaataggtgattataaatactatttcaattctgatggagttatgcaaaaaggatttgttagtataaatgataataaacactattttgatgattctggtgttatgaaagtaggttacactgaaatagatggcaagcatttctactttgctgaaaacggagaaatgcaaataggagtatttaatacagaagatggatttaaatattttgctcatcataatgaagatttaggaaatgaagaaggtgaagaaatctcatattctggtatattaaatttcaataataaaatttactattttgatgattcatttactgctgtagttggatggaaagatttagaggatggttcaaagtattattttgatgaagatacagcagaagcatatataggtttgtcattaataaatgatggtcaatattattttaatgatgatggaattatgcaagttggatttgtcactataaatgataaagtcttctacttctctgactctggaattatagaatctggagtacaaaacatagatgacaattatttctatatagatgataatggtatagttcaaattggtgtatttgatacttcagatggatataaatattttgcacctgctaatactgtaaatgataatatttacggacaagcagttgaatatagtggtttagttagagttggtgaagatgtatattattttggagaaacatatacaattgagactggatggatatatgatatggaaaatgaaagtgataaatattatttcaatccagaaactaaaaaagcatgcaaaggtattaatttaattgatgatataaaatattattttgatgagaagggcataatgagaacgggtcttatatcatttgaaaataataattattactttaatgagaatggtgaaatgcaatttggttatataaatatagaagataagatgttctattttggtgaagatggtgtcatgcagattggagtatttaatacaccagatggatttaaatactttgcacatcaaaatactttggatgagaattttgagggagaatcaataaactatactggttggttagatttagatgaaaagagatattattttacagatgaatatattgcagcaactggttcagttattattgatggtgaggagtattattttgatcctgatacagctcaattagtgattagtgaatag

SEQ ID NO: 14 - DNA, 7101 bp, Artificial
  Synthetic nucleotide sequence: TcdB (D286A D288A C698A mutations)
atgagtttagttaatagaaaacagttagaaaaaatggcaaatgtaagatttcgtactcaagaagatgaatatgttgcaatattggatgctttagaagaatatcataatatgtcagagaatactgtagtcgaaaaatatttaaaattaaaagatataaatagtttaacagatatttatatagatacatataaaaaatctggtagaaataaagccttaaaaaaatttaaggaatatctagttacagaagtattagagctaaagaataataatttaactccagttgagaaaaatttacattttgtttggattggaggtcaaataaatgacactgctattaattatataaatcaatggaaagatgtaaatagtgattataatgttaatgttttttatgatagtaatgcatttttgataaacacattgaaaaaaactgtagtagaatcagcaataaatgatacacttgaatcatttagagaaaacttaaatgaccctagatttgactataataaattcttcagaaaacgtatggaaataatttatgataaacagaaaaatttcataaactactataaagctcaaagagaagaaaatcctgaacttataattgatgatattgtaaagacatatctttcaaatgagtattcaaaggagatagatgaacttaatacctatattgaagaatccttaaataaaattacacagaatagtggaaatgatgttagaaactttgaagaatttaaaaatggagagtcattcaacttatatgaacaagagttggtagaaaggtggaatttagctgctgcttctgacatattaagaatatctgcattaaaagaaattggtggtatgtatttagcagttgcaatgttaccaggaatacaaccagacttatttgagtctatagagaaacctagttcagtaacagtggatttttgggaaatgacaaagttagaagctataatgaaatacaaagaatatataccagaatatacctcagaacattttgacatgttagacgaagaagttcaaagtagttttgaatctgttctagcttctaagtcagataaatcagaaatattctcatcacttggtgatatggaggcatcaccactagaagttaaaattgcatttaatagtaagggtattataaatcaagggctaatttctgtgaaagactcatattgtagcaatttaatagtaaaacaaatcgagaatagatataaaatattgaataatagtttaaatccagctattagcgaggataatgattttaatactacaacgaatacctttattgatagtataatggctgaagctaatgcagataatggtagatttatgatggaactaggaaagtatttaagagttggtttcttcccagatgttaaaactactattaacttaagtggccctgaagcttatgcggcagcttatcaagatttattaatgtttaaagaaggcagtatgaatatccatttgatagaagctgatttaagaaactttgaaatctctaaaactaatatttctcaatcaactgaacaagaaatggcttctttatggtcatttgacgatgcaagagctaaagctcaatttgaagaatataaaaggaattattttgaaggttctcttggtgaagatgataatcttgatttttctcaaaatatagtagttgacaaggagtatcttttagaaaaaatatcttcattagcaagaagttcagagagaggatatatacactatattgttcagttacaaggagataaaattagttatgaagcagcatgtaacttatttgcaaagactccttatgatagtgtactgtttcagaaaaatatagaagattcagaaattgcatattattataatcctggagatggtgaaatacaagaaatagacaagtataaaattccaagtataatttctgatagacctaagattaaattaacatttattggtcatggtaaagatgaatttaatactgatatatttgcaggttttgatgtagattcattatccacagaaatagaagcagcaatagatttagctaaagaggatatttctcctaagtcaatagaaataaatttattaggagctaatatgtttagctactctatcaacgtagaggagacttatcctggaaaattattacttaaagttaaagataaaatatcagaattaatgccatctataagtcaagactctattatagtaagtgcaaatcaatatgaagttagaataaatagtgaaggaagaagagaattattggatcattctggtgaatggataaataaagaagaaagtattataaaggatatttcatcaaaagaatatatatcatttaatcctaaagaaaataaaattacagtaaaatctaaaaatttacctgagctatctacattattacaagaaattagaaataattctaattcaagtgatattgaactagaagaaaaagtaatgttaacagaatgtgagataaatgttatttcaaatatagatacgcaaattgttgaggaaaggattgaagaagctaagaatttaacttctgactctattaattatataaaagatgaatttaaactaatagaatctatttctgatgcactatgtgacttaaaacaacagaatgaattagaagattctcattttatatcttttgaggacatatcagagactgatgagggatttagtataagatttattaataaagaaactggagaatctatatttgtagaaactgaaaaaacaatattctctgaatatgctaatcatataactgaagagatttctaagataaaaggtactatatttgatactgtaaatggtaagttagtaaaaaaagtaaatttagatactacacacgaagtaaatactttaaatgctgcattttttatacaatcattaatagaatataatagttctaaagaatctcttagtaatttaagtgtagcaatgaaagtccaagtttacgctcaattatttagtactggtttaaatactattacagatgcagccaaagttgttgaattagtatcaactgcattagatgaaactatagacttacttcctacattatctgaaggattacctataattgcaactattatagatggtgtaagtttaggtgcagcaatcaaagagctaagtgaaacgagtgacccattattaagacaagaaatagaagctaagataggtataatggcagtaaatttaacaacagctacaactgcaatcattacttcatctttggggatagctagtggatttagtatacttttagttcctttagcaggaatttcagcaggtataccaagcttagtaaacaatgaacttgtacttcgagataaggcaacaaaggttgtagattattttaaacatgtttcattagttgaaactgaaggagtatttactttattagatgataaaataatgatgccacaagatgatttagtgatatcagaaatagattttaataataattcaatagttttaggtaaatgtgaaatctggagaatggaaggtggttcaggtcatactgtaactgatgatatagatcacttcttttcagcaccatcaataacatatagagagccacacttatctatatatgacgtattggaagtacaaaaagaagaacttgatttgtcaaaagatttaatggtattacctaatgctccaaatagagtatttgcttgggaaacaggatggacaccaggtttaagaagcttagaaaatgatggcacaaaactgttagaccgtataagagataactatgaaggtgagttttattggagatattttgcttttatagctgatgctttaataacaacattaaaaccaagatatgaagatactaatataagaataaatttagatagtaatactagaagttttatagttccaataataactacagaatatataagagaaaaattatcatattctttctatggttcaggaggaacttatgcattgtctctttctcaatataatatgggtataaatatagaattaagtgaaagtgatgtttggattatagatgttgataatgttgtgagagatgtaactatagaatctgataaaattaaaaaaggtgatttaatagaaggtattttatctacactaagtattgaagagaataaaattatcttaaatagccatgagattaatttttctggtgaggtaaatggaagtaatggatttgtttctttaacattttcaattttagaaggaataaatgcaattatagaagttgatttattatctaaatcatataaattacttatttctggcgaattaaaaatattgatgttaaattcaaatcatattcaacagaaaatagattatataggattcaatagcgaattacagaaaaatataccatatagctttgtagatagtgaaggaaaagagaatggttttattaatggttcaacaaaagaaggtttatttgtatctgaattacctgatgtagttcttataagtaaggtttatatggatgatagtaagccttcatttggatattatagtaataatttgaaagatgtcaaagttataactaaagataatgttaatatattaacaggttattatcttaaggatgatataaaaatctctctttctttgactctacaagatgaaaaaactataaagttaaatagtgtgcatttagatgaaagtggagtagctgagattttgaagttcatgaatagaaaaggtaatacaaatacttcagattctttaatgagctttttagaaagtatgaatataaaaagtattttcgttaatttcttacaatctaatattaagtttatattagatgctaattttataataagtggtactacttctattggccaatttgagtttatttgtgatgaaaatgataatatacaaccatatttcattaagtttaatacactagaaactaattatactttatatgtaggaaatagacaaaatatgatagtggaaccaaattatgatttagatgattctggagatatatcttcaactgttatcaatttctctcaaaagtatctttatggaatagacagttgtgttaataaagttgtaatttcaccaaatatttatacagatgaaataaatataacgcctgtatatgaaacaaataatacttatccagaagttattgtattagatgcaaattatataaatgaaaaaataaatgttaatatcaatgatctatctatacgatatgtatggagtaatgatggtaatgattttattcttatgtcaactagtgaagaaaataaggtgtcacaagttaaaataagattcgttaatgtttttaaagataagactttggcaaataagctatcttttaactttagtgataaacaagatgtacctgtaagtgaaataatcttatcatttacaccttcatattatgaggatggattgattggctatgatttgggtctagtttctttatataatgagaaattttatattaataactttggaatgatggtatctggattaatatatattaatgattcattatattattttaaaccaccagtaaataatttgataactggatttgtgactgtaggcgatgataaatactactttaatccaattaatggtggagctgcttcaattggagagacaataattgatgacaaaaattattatttcaaccaaagtggagtgttacaaacaggtgtatttagtacagaagatggatttaaatattttgccccagctaatacacttgatgaaaacctagaaggagaagcaattgattttactggaaaattaattattgacgaaaatatttattattttgatgataattatagaggagctgtagaatggaaagaattagatggtgaaatgcactattttagcccagaaacaggtaaagcttttaaaggtctaaatcaaataggtgattataaatactatttcaattctgatggagttatgcaaaaaggatttgttagtataaatgataataaacactattttgatgattctggtgttatgaaagtaggttacactgaaatagatggcaagcatttctactttgctgaaaacggagaaatgcaaataggagtatttaatacagaagatggatttaaatattttgctcatcataatgaagatttaggaaatgaagaaggtgaagaaatctcatattctggtatattaaatttcaataataaaatttactattttgatgattcatttactgctgtagttggatggaaagatttagaggatggttcaaagtattattttgatgaagatacagcagaagcatatataggtttgtcattaataaatgatggtcaatattattttaatgatgatggaattatgcaagttggatttgtcactataaatgataaagtcttctacttctctgactctggaattatagaatctggagtacaaaacatagatgacaattatttctatatagatgataatggtatagttcaaattggtgtatttgatacttcagatggatataaatattttgcacctgctaatactgtaaatgataatatttacggacaagcagttgaatatagtggtttagttagagttggtgaagatgtatattattttggagaaacatatacaattgagactggatggatatatgatatggaaaatgaaagtgataaatattatttcaatccagaaactaaaaaagcatgcaaaggtattaatttaattgatgatataaaatattattttgatgagaagggcataatgagaacgggtcttatatcatttgaaaataataattattactttaatgagaatggtgaaatgcaatttggttatataaatatagaagataagatgttctattttggtgaagatggtgtcatgcagattggagtatttaatacaccagatggatttaaatactttgcacatcaaaatactttggatgagaattttgagggagaatcaataaactatactggttggttagatttagatgaaaagagatattattttacagatgaatatattgcagcaactggttcagttattattgatggtgaggagtattattttgatcctgatacagctcaattagtgattagtgaatag

SEQ ID NO: 15 - protein, 2710 aa, Clostridium difficile
MSLISKEELIKLAYSIRPRENEYKTILTNLDEYNKLTTNNNENKYLQLKKLNESIDVFMNKYKNSSRNRALSNLKKDILKEVILIKNSNTSPVEKNLHFVWIGGEVSDIALEYIKQWADINAEYNIKLWYDSEAFLVNTLKKAIVESSTTEALQLLEEEIQNPQFDNMKFYKKRMEFIYDRQKRFINYYKSQINKPTVPTIDDIIKSHLVSEYNRDETLLESYRTNSLRKINSNHGIDIRANSLFTEQELLNIYSQELLNRGNLAAASDIVRLLALKNFGGVYLDVDMLPGIHSDLFKTIPRPSSIGLDRWEMIKLEAIMKYKKYINNYTSENFDKLDQQLKDNFKLIIESKSEKSEIFSKLENLNVSDLEIKIAFALGSVINQALISKQGSYLTNLVIEQVKNRYQFLNQHLNPAIESDNNFTDTTKIFHDSLFNSATAENSMFLTKIAPYLQVGFMPEARSTISLSGPGAYASAYYDFINLQENTIEKTLKASDLIEFKFPENNLSQLTEQEINSLWSFDQASAKYQFEKYVRDYTGGSLSEDNGVDFNKNTALDKNYLLNNKIPSNNVEEAGSKNYVHYIIQLQGDDISYEATCNLFSKNPKNSIIIQRNMNESAKSYFLSDDGESILELNKYRIPERLKNKEKVKVTFIGHGKDEFNTSEFARLSVDSLSNEISSFLDTIKLDISPKNVEVNLLGCNMFSYDFNVEETYPGKLLLSIMDKITSTLPDVNKDSITIGANQYEVRINSEGRKELLAHSGKWINKEEAIMSDLSSKEYIFFDSIDNKLKAKSKNIPGLASISEDIKTLLLDASVSPDTKFILNNLKLNIESSIGDYIYYEKLEPVKNIIHNSIDDLIDEFNLLENVSDELYELKKLNNLDEKYLISFEDISKNNSTYSVRFINKSNGESVYVETEKEIFSKYSEHITKEISTIKNSIITDVNGNLLDNIQLDHTSQVNTLNAAFFIQSLIDYSSNKDVLNDLSTSVKVQLYAQLFSTGLNTIYDSIQLVNLISNAVNDTINVLPTITEGIPIVSTILDGINLGAAIKELLDEHDPLLKKELEAKVGVLAINMSLSIAATVASIVGIGAEVTIFLLPIAGISAGIPSLVNNELILHDKATSVVNYFNHLSESKEYGPLKTEDDKILVPIDDLVISEIDFNNNSIKLGTCNILAMEGGSGHTVTGNIDHFFSSPYISSHIPSLSVYSAIGIKTENLDFSKKIMMLPNAPSRVFWWETGAVPGLRSLENNGTKLLDSIRDLYPGKFYWRFYAFFDYAITTLKPVYEDTNTKIKLDKDTRNFIMPTITTDEIRNKLSYSFDGAGGTYSLLLSSYPISMNINLSKDDLWIFNIDNEVREISIENGTIKKGNLIEDVLSKIDINKNKLIIGNQTIDFSGDIDNKDRYIFLTCELDDKISLIIEINLVAKSYSLLLSGDKNYLISNLSNTIEKINTLGLDSKNIAYNYTDESNNKYFGAISKTSQKSIIHYKKDSKNILEFYNGSTLEFNSKDFIAEDINVFMKDDINTITGKYYVDNNTDKSIDFSISLVSKNQVKVNGLYLNESVYSSYLDFVKNSDGHHNTSNFMNLFLNNISFWKLFGFENINFVIDKYFTLVGKTNLGYVEFICDNNKNIDIYFGEWKTSSSKSTIFSGNGRNVVVEPIYNPDTGEDISTSLDFSYEPLYGIDRYINKVLIAPDLYTSLININTNYYSNEYYPEIIVLNPNTFHKKVNINLDSSSFEYKWSTEGSDFILVRYLEESNKKILQKIRIKGILSNTQSFNKMSIDFKDIKKLSLGYIMSNFKSFNSENELDRDHLGFKIIDNKTYYYDEDSKLVKGLININNSLFYFDPIESNLVTGWQTINGKKYYFDINTGAASTSYKIINGKHFYFNNNGVMQLGVFKGPDGFEYFAPANTQNNNIEGQAIVYQSKFLTLNGKKYYFDNDSKAVTGWRIINNEKYYFNPNNAIAAVGLQVIDNNKYYFNPDTAIISKGWQTVNGSRYYFDTDTAIAFNGYKTIDGKHFYFDSDCVVKIGVFSGSNGFEYFAPANTYNNNIEGQAIVYQSKFLTLNGKKYYFDNNSKAVTGWQTIDSKKYYFNTNTAEAATGWQTIDGKKYYFNTNTAEAATGWQTIDGKKYYFNTNTSIASTGYTIINGKYFYFNTDGIMQIGVFKVPNGFEYFAPANTHNNNIEGQAILYQNKFLTLNGKKYYFGSDSKAITGWQTIDGKKYYFNPNNAIAATHLCTINNDKYYFSYDGILQNGYITIERNNFYFDANNESKMVTGVFKGPNGFEYFAPANTHNNNIEGQAIVYQNKFLTLNGKKYYFDNDSKAVTGWQTIDSKKYYFNLNTAVAVTGWQTIDGEKYYFNLNTAEAATGWQTIDGKRYYFNTNTYIASTGYTIINGKHFYFNTDGIMQIGVFKGPDGFEYFAPANTHNNNIEGQAILYQNKFLTLNGKKYYFGSDSKAVTGLRTIDGKKYYFNTNTAVAVTGWQTINGKKYYFNTNTYIASTGYTIISGKHFYFNTDGIMQIGVFKGPDGFEYFAPANTDANNIEGQAIRYQNRFLYLHDNIYYFGNDSKAATGWATIDGNRYYFEPNTAMGANGYKTIDNKNFYFRNGLPQIGVFKGPNGFEYFAPANTDANNIDGQAIRYQNRFLHLLGKIYYFGNNSKAVTGWQTINSKVYYFMPDTAMAAAGGLFEIDGVIYFFGVDGVKAPGIYG

SEQ ID NO: 16 - DNA, 8133 bp, Clostridium difficile
atgtctttaatatctaaagaagagttaataaaactcgcatatagcattagaccaagagaaaatgagtataaaactatactaactaatttagacgaatataataagttaactacaaacaataatgaaaataaatatttacaattaaaaaaactaaatgaatcaattgatgtttttatgaataaatataaaaattcaagcagaaatagagcactctctaatctaaaaaaagatatattaaaagaagtaattcttattaaaaattccaatacaagtcctgtagaaaaaaatttacattttgtatggataggtggagaagtcagtgatattgctcttgaatacataaaacaatgggctgatattaatgcagaatataatattaaactgtggtatgatagtgaagcattcttagtcaatacactaaaaaaggctatagttgaatcttctaccactgaagcattacagctactagaggaagagattcaaaatcctcaatttgataatatgaaattttacaaaaaaaggatggaatttatatatgatagacaaaaaaggtttataaattattataaatctcaaatcaataaacctacagtacctacaatagatgatattataaagtctcatctagtatctgaatataatagagatgaaactttattagaatcatatagaacaaattctttgagaaaaataaatagtaatcatgggatagatatcagggctaatagtttgtttacagaacaagagttattaaatatttatagtcaggagttgttaaatcgtgggaatttagctgcagcatctgacatagtaagattattagccctaaaaaattttggcggagtatatttagatgttgatatgcttccaggtattcactctgatttatttaaaacaatacctagacctagctctattggactagaccgttgggaaatgataaaattagaggctattatgaagtataaaaaatatataaataattatacatcagaaaactttgataaacttgatcaacaattaaaagataattttaaactcattatagaaagtaaaagtgaaaaatctgagatattttctaaattagaaaatttaaatgtatctgatcttgaaattaaaatagctttcgctttaggcagtgttataaatcaagccttgatatcaaaacaaggttcatatcttactaacctagtaatagaacaagtaaaaaatagatatcaatttttaaaccaacaccttaacccagccatagagtctgacaataacttcacagatactactaagatttttcatgattcactatttaattcagctaccgcagaaaactctatgtttttaacaaaaatagcaccatacttacaagtaggttttatgccagaagctcgctccacaataagtttaagtggtccaggagcttatgcatcagcttactatgatttcataaatttacaagaaaatactatagaaaaaactttaaaagcatcagatttaatagaatttaaattcccagaaaataatctatctcaattgacagaacaagaaataaatagtctatggagctttgatcaagcaagtgcaaaatatcaatttgagaaatatgtaagagattatactggtggatctctttctgaagacaatggggtagactttaataaaaatactgccctcgacaaaaactatttattaaataataaaattccatcaaacaatgtagaagaagctggaagtaaaaattatgttcattatatcatacagttacaaggagatgatataagttatgaagcaacatgcaatttattttctaaaaatcctaaaaatagtattattatacaacgaaatatgaatgaaagtgcaaaaagttactttttaagtgatgatggagaatctattttagaattaaataaatataggatacctgaaagattaaaaaataaggaaaaagtaaaagtaacctttattggacatggtaaagatgaattcaacacaagcgaatttgctagattaagtgtagattcactttccaatgagataagttcatttttagataccataaaattagatatatcacctaaaaatgtagaagtaaacttgcttggatgtaatatgtttagttatgattttaatgttgaagaaacttatcctggtaagttactattaagtattatggacaaaattacttccactttacctgatgtaaataaagattctattactataggagcaaatcaatatgaagtaagaattaatagtgagggaagaaaagaacttctagctcactcaggtaaatggataaataaagaggaagctattatgagcgatttatctagtaaagaatacattttttttgattccatagataataagctaaaagcaaagtccaagaatattccaggtttagcgtcaatatcagaagatataaaaacattattacttgatgcaagtgttagtcctgatacaaaatttattttaaataatcttaagcttaatattgaatcttctattggtgattacatttattatgaaaaattagaacctgttaaaaatataatccacaattctatagatgatttaatagatgagttcaatctacttgaaaatgtatctgatgaattatatgaattaaaaaaattaaataatctagatgagaagtatttaatatcttttgaagatatctcaaaaaataattcaacttattctgtaagatttattaacaaaagtaatggtgaatcagtttatgtagagacagaaaaagaaattttttcaaaatatagcgaacatattacaaaagaaataagtactataaagaatagtataattacagatgttaatggtaatttattggataatatacagttagatcatacttctcaagttaatacattaaacgcagcattctttattcaatcattaatagattatagtagcaataaagatgtactgaatgatttaagtacctcagttaaggttcaactttatgctcaactatttagtacaggtttaaatactatatatgactctatccaattagtaaatttaatatcaaatgcagtaaatgatactataaatgtactacctacaataacagaggggatacctattgtatctactatattagacggaataaacttaggtgcagcaattaaggaattactagacgaacatgacccattactaaaaaaagaactagaagctaaggtgggtgttttagcaataaatatgtcattatctatagctgcaacggtagcttcaattgttggaataggtgctgaagttactattttcttattacctatagctggtatatctgcgggaataccttcattagttaataatgaattaatattgcatgataaggcaacttcagtggtaaactattttaatcatttgtctgaatctaaagaatatggccctcttaaaacagaagatgataaaattttagttcctattgatgatttagtaatatcagaaatagattttaataataattcgataaaactaggaacatgtaatatattagcaatggaggggggatcaggacacacagtgactggtaatatagatcactttttctcatctccatatataagctctcatattccttcattatcagtttattctgcaataggtataaaaacagaaaatctagatttttcaaaaaaaataatgatgttaccaaatgctccttcaagagtgttttggtgggaaactggagcagttccaggtttaagatcattggaaaataatgggactaaattgcttgattcaataagagatttatacccaggcaaattttactggagattctatgcctttttcgattatgcaataactacattaaaaccagtgtatgaagacactaatactaaaattaaactagataaagatactagaaactttataatgccaactataactactgacgaaattagaaacaaattatcttattcatttgatggagcaggaggaacttactctttattattatcttcatatccaatatcaatgaatataaatttatctaaagatgatttatggatatttaatattgataatgaagtaagagaaatatctatagaaaatggtactattaaaaaaggaaatttaatagaagatgttttaagtaaaattgatataaataaaaataaacttattataggcaatcaaacaatagatttttcaggtgatatagataacaaagatagatatatattcttgacttgtgagttagatgataaaattagtttaataatagaaataaatcttgttgcaaaatcttatagtttgttattgtctggggataaaaattatttgatatccaatttatctaatactattgagaaaatcaatactttaggcctagatagtaaaaatatagcttacaattacactgatgaatctaataataaatattttggagctatatctaaaacaagtcaaaaaagcataatacattataaaaaagacagtaaaaatatattagaattttataatggcagtacattagaatttaacagtaaagactttattgctgaagatataaatgtatttatgaaagatgatattaatactataacaggaaaatactatgttgataataatactgataaaagtatagatttctctatttctttagttagtaaaaatcaagtaaaagtaaatggattatatttaaatgaatccgtatactcatcttaccttgattttgtgaaaaattcagatggacaccataatacttctaattttatgaatttatttttgaacaatataagtttctggaaattgtttgggtttgaaaatataaattttgtaatcgataaatactttacccttgttggtaaaactaatcttggatatgtagaatttatttgtgacaataataaaaatatagatatatattttggtgaatggaaaacatcgtcatctaaaagcactatatttagcggaaatggtagaaatgttgtagtagagcctatatataatcctgatacgggtgaagatatatctacttcactagatttttcctatgaacctctctatggaatagatagatatatcaataaagtattgatagcacctgatttatatacaagtttaataaatattaataccaattattattcaaatgagtactaccctgagattatagttcttaacccaaatacattccacaaaaaagtaaatataaatttagatagttcttcttttgagtataaatggtctacagaaggaagtgactttattttagttagatacttagaagaaagtaataaaaaaatattacaaaaaataagaatcaaaggtatcttatctaatactcaatcatttaataaaatgagtatagattttaaagatattaaaaaactatcattaggatatataatgagtaattttaaatcatttaattctgaaaatgaattagatagagatcatttaggatttaaaataatagataataaaacttattactatgatgaagatagtaaattagttaaaggattaatcaatataaataattcattattctattttgatcctatagaatctaacttagtaactggatggcaaactatcaatggtaaaaaatattattttgatataaatactggagcagcttcaactagttataaaattattaatggtaaacacttttattttaataataatggtgtgatgcagttaggagtatttaaaggacctgatggatttgagtattttgcacctgccaatactcagaataataacatagaaggtcaggctatagtttatcaaagtaaattcttaactttgaatggcaaaaaatattattttgataatgactcaaaagcagtcactggatggaggattattaacaatgagaaatattactttaatcctaataatgctattgctgcagtcggattgcaagtaattgacaataataagtattatttcaatcctgacactgctatcatctcaaaaggttggcagactgttaatggtagtagatactactttgatactgataccgctattgcctttaatggttataaaactattgatggtaaacacttttattttgatagtgattgtgtagtgaaaataggtgtgtttagtggctctaatggatttgaatatttcgcacctgctaatacttataataataacatagaaggtcaggctatagtttatcaaagtaaattcttaactttgaatggtaaaaaatattactttgataataactcaaaagcagttaccggatggcaaactattgatagtaaaaaatattactttaatactaacactgctgaagcagctactggatggcaaactattgatggtaaaaagtattactttaatactaacactgctgaagcagctactggatggcaaactattgatggtaaaaaatattactttaatactaacacttctatagcttcaactggttatacaattattaatggtaaatatttttattttaatactgatggtattatgcagataggagtgtttaaagtacctaatggatttgaatactttgcacctgctaatactcataataataacatagaaggtcaagctatactttaccaaaataaattcttaactttgaatggtaaaaaatattactttggtagtgactcaaaagcaattactggatggcaaaccattgatggtaaaaaatattactttaatcctaataatgctattgctgcgactcatctatgcactataaataacgacaagtattactttagttatgatggaattcttcaaaatggatatattactattgaaagaaataatttctattttgatgctaataatgaatctaaaatggtaacaggagtatttaaaggacctaatggatttgagtattttgcacctgctaatactcataataataacatagaaggtcaggctatagtttaccagaataaattcttaactttgaatggcaaaaaatattattttgataatgactcaaaagcagttactggatggcaaactattgatagtaaaaaatattactttaatcttaacactgctgttgcagttactggatggcaaactattgatggtgaaaaatattactttaatcttaacactgctgaagcagctactggatggcaaactattgatggtaaaagatactactttaatactaacacttatatagcttcaactggttatacgattattaatggtaaacatttttattttaatactgatggtattatgcagataggagtgtttaaaggacctgatggatttgaatactttgcacctgctaatactcataataataacatagaaggtcaagctatactttaccaaaataaattcttaactttgaatggtaaaaaatattactttggtagtgactcaaaagcagttaccggattgcgaactattgatggtaaaaaatattactttaatactaacactgctgttgcagttactggatggcaaactattaatggtaaaaaatactactttaatactaacacttatatagcttcaactggttatacaattattagtggtaaacatttttattttaatactgatggtattatgcagataggagtgtttaaaggacctgatggatttgaatactttgcacctgctaatacggatgctaacaacatagaaggtcaagctatacgttatcaaaatagattcctatatttacatgacaatatatattactttggcaatgattcaaaagcggctactggttgggcaactattgatggtaatagatattacttcgagcctaatacagctatgggtgcgaatggttataaaactattgataataaaaatttttactttagaaatggtttacctcagataggagtgtttaaaggacctaatggatttgaatactttgcacctgctaatacggatgctaacaatatagatggtcaagctatacgttatcaaaatagattcctacatttacttggaaaaatatattactttggtaataactcaaaagcagttactggatggcaaactattaatagtaaagtatattactttatgcctgatactgctatggctgcagctggtggacttttcgagattgatggtgttatatatttctttggtgttgatggagtaaaagcccctgggatatatggctaa

SEQ ID NO: 17 - protein, 2710 aa, Clostridium difficile; identical to SEQ ID NO: 15

SEQ ID NO: 18 - DNA, 8133 bp, Clostridium difficile; identical to SEQ ID NO: 16

SEQ ID NO: 19 - protein, 2710 aa, Clostridium difficile
MSLISKEELIKLAYSIRPRENEYKTILTNLDEYNKLTTNNNENKYLQLKKLNESIDVFMNKYKTSSRNRALSNLKKDILKEVILIKNSNTSPVEKNLHFVWIGGEVSDIALEYIKQWADINAEYNIKLWYDSEAFLVNTLKKAIVESSTTEALQLLEEEIQNPQFDNMKFYKKRMEFIYDRQKRFINYYKSQINKPTVPTIDDIIKSHLVSEYNRDETVLESYRTNSLRKINSNHGIDIRANSLFTEQELLNIYSQELLNRGNLAAASDIVRLLALKNFGGVYLDVDMLPGIHSDLFKTISRPSSIGLDRWEMIKLEAIMKYKKYINNYTSENFDKLDQQLKDNFKLIIESKSEKSEIFSKLENLNVSDLEIKIAFALGSVINQALISKQGSYLTNLVIEQVKNRYQFLNQHLNPAIESDNNFTDTTKIFHDSLFNSATAENSMFLTKIAPYLQVGFMPEARSTISLSGPGAYASAYYDFINLQENTIEKTLKASDLIEFKFPENNLSQLTEQEINSLWSFDQASAKYQFEKYVRDYTGGSLSEDNGVDFNKNTALDKNYLLNNKIPSNNVEEAGSKNYVHYIIQLQGDDISYEATCNLFSKNPKNSIIIQRNMNESAKSYFLSDDGESILELNKYRIPERLKNKEKVKVTFIGHGKDEFNTSEFARLSVDSLSNEISSFLDTIKLDISPKNVEVNLLGCNMFSYDFNVEETYPGKLLLSIMDKITSTLPDVNKNSITIGANQYEVRINSEGRKELLAHSGKWINKEEAIMSDLSSKEYIFFDSIDNKLKAKSKNIPGLASISEDIKTLLLDASVSPDTKFILNNLKLNIESSIGDYIYYEKLEPVKNIIHNSIDDLIDEFNLLENVSDELYELKKLNNLDEKYLISFEDISKNNSTYSVRFINKSNGESVYVETEKEIFSKYSEHITKEISTIKNSIITDVNGNLLDNIQLDHTSQVNTLNAAFFIQSLIDYSSNKDVLNDLSTSVKVQLYAQLFSTGLNTIYDSIQLVNLISNAVNDTINVLPTITEGIPIVSTILDGINLGAAIKELLDEHDPLLKKELEAKVGVLAINMSLSIAATVASIVGIGAEVTIFLLPIAGISAGIPSLVNNELILHDKATSVVNYFNHLSESKKYGPLKTEDDKILVPIDDLVISEIDFNNNSIKLGTCNILAMEGGSGHTVTGNIDHFFSSPSISSHIPSLSIYSAIGIETENLDFSKKIMMLPNAPSRVFWWETGAVPGLRSLENDGTRLLDSIRDLYPGKFYWRFYAFFDYAITTLKPVYEDTNIKIKLDKDTRNFIMPTITTNEIRNKLSYSFDGAGGTYSLLLSSYPISTNINLSKDDLWIFNIDNEVREISIENGTIKKGKLIKDVLSKIDINKNKLIIGNQTIDFSGDIDNKDRYIFLTCELDDKISLIIEINLVAKSYSLLLSGDKNYLISNLSNTIEKINTLGLDSKNIAYNYTDESNNKYFGAISKTSQKSIIHYKKDSKNILEFYNDSTLEFNSKDFIAEDINVFMKDDINTITGKYYVDNNTDKSIDFSISLVSKNQVKVNGLYLNESVYSSYLDFVKNSDGHHNTSNFMNLFLDNISFWKLFGFENINFVIDKYFTLVGKTNLGYVEFICDNNKNIDIYFGEWKTSSSKSTIFSGNGRNVVVEPIYNPDTGEDISTSLDFSYEPLYGIDRYINKVLIAPDLYTSLININTNYYSNEYYPEIIVLNPNTFHKKVNINLDSSSFEYKWSTEGSDFILVRYLEESNKKILQKIRIKGILSNTQSFNKMSIDFKDIKKLSLGYIMSNFKSFNSENELDRDHLGFKIIDNKTYYYDEDSKLVKGLININNSLFYFDPIEFNLVTGWQTINGKKYYFDINTGAALTSYKIINGKHFYFNNDGVMQLGVFKGPDGFEYFAPANTQNNNIEGQAIVYQSKFLTLNGKKYYFDNNSKAVTGWRIINNEKYYFNPNNAIAAVGLQVIDNNKYYFNPDTAIISKGWQTVNGSRYYFDTDTAIAFNGYKTIDGKHFYFDSDCVVKIGVFSTSNGFEYFAPANTYNNNIEGQAIVYQSKFLTLNGKKYYFDNNSKAVTGLQTIDSKKYYFNTNTAEAATGWQTIDGKKYYFNTNTAEAATGWQTIDGKKYYFNTNTAIASTGYTIINGKHFYFNTDGIMQIGVFKGPNGFEYFAPANTDANNIEGQAILYQNEFLTLNGKKYYFGSDSKAVTGWRIINNKKYYFNPNNAIAAIHLCTINNDKYYFSYDGILQNGYITIERNNFYFDANNESKMVTGVFKGPNGFEYFAPANTHNNNIEGQAIVYQNKFLTLNGKKYYFDNDSKAVTGWQTIDGKKYYFNLNTAEAATGWQTIDGKKYYFNLNTAEAATGWQTIDGKKYYFNTNTFIASTGYTSINGKHFYFNTDGIMQIGVFKGPNGFEYFAPANTDANNIEGQAILYQNKFLTLNGKKYYFGSDSKAVTGLRTIDGKKYYFNTNTAVAVTGWQTINGKKYYFNTNTSIASTGYTIISGKHFYFNTDGIMQIGVFKGPDGFEYFAPANTDANNIEGQAIRYQNRFLYLHDNIYYFGNNSKAATGWVTIDGNRYYFEPNTAMGANGYKTIDNKNFYFRNGLPQIGVFKGSNGFEYFAPANTDANNIEGQAIRYQNRFLHLLGKIYYFGNNSKAVTGWQTINGKVYYFMPDTAMAAAGGLFEIDGVIYFFGVDGVKAPGIYG

SEQ ID NO: 20 - DNA, 8133 bp, Clostridium difficile
atgtctttaatatctaaagaagagttaataaaactcgcatatagcattagaccaagagaaaatgagtataaaactatactaactaatttagacgaatataataagttaactacaaacaataatgaaaataaatatttgcaattaaaaaaactaaatgaatcaattgatgtttttatgaataaatataaaacttcaagcagaaatagagcactctctaatctaaaaaaagatatattaaaagaagtaattcttattaaaaattccaatacaagccctgtagaaaaaaatttacattttgtatggataggtggagaagtcagtgatattgctcttgaatacataaaacaatgggctgatattaatgcagaatataatattaaactgtggtatgatagtgaagcattcttagtaaatacactaaaaaaggctatagttgaatcttctaccactgaagcattacagctactagaggaagagattcaaaatcctcaatttgataatatgaaattttacaaaaaaaggatggaatttatatatgatagacaaaaaaggtttataaattattataaatctcaaatcaataaacctacagtacctacaatagatgatattataaagtctcatctagtatctgaatataatagagatgaaactgtattagaatcatatagaacaaattctttgagaaaaataaatagtaatcatgggatagatatcagggctaatagtttgtttacagaacaagagttattaaatatttatagtcaggagttgttaaatcgtggaaatttagctgcagcatctgacatagtaagattattagccctaaaaaattttggcggagtatatttagatgttgatatgcttccaggtattcactctgatttatttaaaacaatatctagacctagctctattggactagaccgttgggaaatgataaaattagaggctattatgaagtataaaaaatatataaataattatacatcagaaaactttgataaacttgatcaacaattaaaagataattttaaactcattatagaaagtaaaagtgaaaaatctgagatattttctaaattagaaaatttaaatgtatctgatcttgaaattaaaatagctttcgctttaggcagtgttataaatcaagccttgatatcaaaacaaggttcatatcttactaacctagtaatagaacaagtaaaaaatagatatcaatttttaaaccaacaccttaacccagccatagagtctgataataacttcacagatactactaaaatttttcatgattcattatttaattcagctaccgcagaaaactctatgtttttaacaaaaatagcaccatacttacaagtaggttttatgccagaagctcgctccacaataagtttaagtggtccaggagcttatgcgtcagcttactatgatttcataaatttacaagaaaatactatagaaaaaactttaaaagcatcagatttaatagaatttaaattcccagaaaataatctatctcaattgacagaacaagaaataaatagtctatggagctttgatcaagcaagtgcaaaatatcaatttgagaaatatgtaagagattatactggtggatctctttctgaagacaatggggtagactttaataaaaatactgccctcgacaaaaactatttattaaataataaaattccatcaaacaatgtagaagaagctggaagtaaaaattatgttcattatatcatacagttacaaggagatgatataagttatgaagcaacatgcaatttattttctaaaaatcctaaaaatagtattattatacaacgaaatatgaatgaaagtgcaaaaagctactttttaagtgatgatggagaatctattttagaattaaataaatataggatacctgaaagattaaaaaataaggaaaaagtaaaagtaacctttattggacatggtaaagatgaattcaacacaagcgaatttgctagattaagtgtagattcactttccaatgagataagttcatttttagataccataaaattagatatatcacctaaaaatgtagaagtaaacttacttggatgtaatatgtttagttatgattttaatgttgaagaaacttatcctgggaagttgctattaagtattatggacaaaattacttccactttacctgatgtaaataaaaattctattactataggagcaaatcaatatgaagtaagaattaatagtgagggaagaaaagaacttctggctcactcaggtaaatggataaataaagaagaagctattatgagcgatttatctagtaaagaatacattttttttgattctatagataataagctaaaagcaaagtccaagaatattccaggattagcatcaatatcagaagatataaaaacattattacttgatgcaagtgttagtcctgatacaaaatttattttaaataatcttaagcttaatattgaatcttctattggggattacatttattatgaaaaattagagcctgttaaaaatataattcacaattctatagatgatttaatagatgagttcaatctacttgaaaatgtatctgatgaattatatgaattaaaaaaattaaataatctagatgagaagtatttaatatcttttgaagatatctcaaaaaataattcaacttactctgtaagatttattaacaaaagtaatggtgagtcagtttatgtagaaacagaaaaagaaattttttcaaaatatagcgaacatattacaaaagaaataagtactataaagaatagtataattacagatgttaatggtaatttattggataatatacagttagatcatacttctcaagttaatacattaaacgcagcattctttattcaatcattaatagattatagtagcaataaagatgtactgaatgatttaagtacctcagttaaggttcaactttatgctcaactatttagtacaggtttaaatactatatatgactctatccaattagtaaatttaatatcaaatgcagtaaatgatactataaatgtactacctacaataacagaggggatacctattgtatctactatattagacggaataaacttaggtgcagcaattaaggaattactagacgaacatgacccattactaaaaaaagaattagaagctaaggtgggtgttttagcaataaatatgtcattatctatagctgcaactgtagcttcaattgttggaataggtgctgaagttactattttcttattacctatagctggtatatctgcaggaataccttcattagttaataatgaattaatattgcatgataaggcaacttcagtggtaaactattttaatcatttgtctgaatctaaaaaatatggccctcttaaaacagaagatgataaaattttagttcctattgatgatttagtaatatcagaaatagattttaataataattcgataaaactaggaacatgtaatatattagcaatggaggggggatcaggacacacagtgactggtaatatagatcactttttctcatctccatctataagttctcatattccttcattatcaatttattctgcaataggtatagaaacagaaaatctagatttttcaaaaaaaataatgatgttacctaatgctccttcaagagtgttttggtgggaaactggagcagttccaggtttaagatcattggaaaatgacggaactagattacttgattcaataagagatttatacccaggtaaattttactggagattctatgcttttttcgattatgcaataactacattaaaaccagtttatgaagacactaatattaaaattaaactagataaagatactagaaacttcataatgccaactataactactaacgaaattagaaacaaattatcttattcatttgatggagcaggaggaacttactctttattattatcttcatatccaatatcaacgaatataaatttatctaaagatgatttatggatatttaatattgataatgaagtaagagaaatatctatagaaaatggtactattaaaaaaggaaagttaataaaagatgttttaagtaaaattgatataaataaaaataaacttattataggcaatcaaacaatagatttttcaggcgatatagataataaagatagatatatattcttgacttgtgagttagatgataaaattagtttaataatagaaataaatcttgttgcaaaatcttatagtttgttattgtctggggataaaaattatttgatatccaatttatctaatactattgagaaaatcaatactttaggcctagatagtaaaaatatagcgtacaattacactgatgaatctaataataaatattttggagctatatctaaaacaagtcaaaaaagcataatacattataaaaaagacagtaaaaatatattagaattttataatgacagtacattagaatttaacagtaaagattttattgctgaagatataaatgtatttatgaaagatgatattaatactataacaggaaaatactatgttgataataatactgataaaagtatagatttctctatttctttagttagtaaaaatcaagtaaaagtaaatggattatatttaaatgaatccgtatactcatcttaccttgattttgtgaaaaattcagatggacaccataatacttctaattttatgaatttatttttggacaatataagtttctggaaattgtttgggtttgaaaatataaattttgtaatcgataaatactttacccttgttggtaaaactaatcttggatatgtagaatttatttgtgacaataataaaaatatagatatatattttggtgaatggaaaacatcgtcatctaaaagcactatatttagcggaaatggtagaaatgttgtagtagagcctatatataatcctgatacgggtgaagatatatctacttcactagatttttcctatgaacctctctatggaatagatagatatataaataaagtattgatagcacctgatttatatacaagtttaataaatattaataccaattattattcaaatgagtactaccctgagattatagttcttaacccaaatacattccacaaaaaagtaaatataaatttagatagttcttcttttgagtataaatggtctacagaaggaagtgactttattttagttagatacttagaagaaagtaataaaaaaatattacaaaaaataagaatcaaaggtatcttatctaatactcaatcatttaataaaatgagtatagattttaaagatattaaaaaactatcattaggatatataatgagtaattttaaatcatttaattctgaaaatgaattagatagagatcatttaggatttaaaataatagataataaaacttattactatgatgaagatagtaaattagttaaaggattaatcaatataaataattcattattctattttgatcctatagaatttaacttagtaactggatggcaaactatcaatggtaaaaaatattattttgatataaatactggagcagctttaactagttataaaattattaatggtaaacacttttattttaataatgatggtgtgatgcagttgggagtatttaaaggacctgatggatttgaatattttgcacctgccaatactcaaaataataacatagaaggtcaggctatagtttatcaaagtaaattcttaactttgaatggcaaaaaatattattttgataataactcaaaagcagtcactggatggagaattattaacaatgagaaatattactttaatcctaataatgctattgctgcagtcggattgcaagtaattgacaataataagtattatttcaatcctgacactgctatcatctcaaaaggttggcagactgttaatggtagtagatactactttgatactgataccgctattgcctttaatggttataaaactattgatggtaaacacttttattttgatagtgattgtgtagtgaaaataggtgtgtttagtacctctaatggatttgaatattttgcacctgctaatacttataataataacatagaaggtcaggctatagtttatcaaagtaaattcttaactttgaatggtaaaaaatattactttgataataactcaaaagcagttaccggattgcaaactattgatagtaaaaaatattactttaatactaacactgctgaagcagctactggatggcaaactattgatggtaaaaaatattactttaatactaacactgctgaagcagctactggatggcaaactattgatggtaaaaaatattactttaatactaacactgctatagcttcaactggttatacaattattaatggtaaacatttttattttaatactgatggtattatgcagataggagtgtttaaaggacctaatggatttgaatattttgcacctgctaatacggatgctaacaacatagaaggtcaagctatactttaccaaaatgaattcttaactttgaatggtaaaaaatattactttggtagtgactcaaaagcagttactggatggagaattattaacaataagaaatattactttaatcctaataatgctattgctgcaattcatctatgcactataaataatgacaagtattactttagttatgatggaattcttcaaaatggatatattactattgaaagaaataatttctattttgatgctaataatgaatctaaaatggtaacaggagtatttaaaggacctaatggatttgagtattttgcacctgctaatactcacaataataacatagaaggtcaggctatagtttaccagaacaaattcttaactttgaatggcaaaaaatattattttgataatgactcaaaagcagttactggatggcaaaccattgatggtaaaaaatattactttaatcttaacactgctgaagcagctactggatggcaaactattgatggtaaaaaatattactttaatcttaacactgctgaagcagctactggatggcaaactattgatggtaaaaaatattactttaatactaacactttcatagcctcaactggttatacaagtattaatggtaaacatttttattttaatactgatggtattatgcagataggagtgtttaaaggacctaatggatttgaatactttgcacctgctaatacggatgctaacaacatagaaggtcaagctatactttaccaaaataaattcttaactttgaatggtaaaaaatattactttggtagtgactcaaaagcagttaccggactgcgaactattgatggtaaaaaatattactttaatactaacactgctgttgcagttactggatggcaaactattaatggtaaaaaatactactttaatactaacacttctatagcttcaactggttatacaattattagtggtaaacatttttattttaatactgatggtattatgcagataggagtgtttaaaggacctgatggatttgaatactttgcacctgctaatacagatgctaacaatatagaaggtcaagctatacgttatcaaaatagattcctatatttacatgacaatatatattattttggtaataattcaaaagcggctactggttgggtaactattgatggtaatagatattacttcgagcctaatacagctatgggtgcgaatggttataaaactattgataataaaaatttttactttagaaatggtttacctcagataggagtgtttaaagggtctaatggatttgaatactttgcacctgctaatacggatgctaacaatatagaaggtcaagctatacgttatcaaaatagattcctacatttacttggaaaaatatattactttggtaataattcaaaagcagttactggatggcaaactattaatggtaaagtatattactttatgcctgatactgctatggctgcagctggtggacttttcgagattgatggtgttatatatttctttggtgttgatggagtaaaagcccctgggatatatggctaa

SEQ ID NO: 21 - protein, 2366 aa, Clostridium difficile
MSLVNRKQLEKMANVRFRVQEDEYVAILDALEEYHNMSENTVVEKYLKLKDINSLTDIYIDTYKKSGRNKALKKFKEYLVTEVLELKNNNLTPVEKNLHFVWIGGQINDTAINYINQWKDVNSDYNVNVFYDSNAFLINTLKKTIVESATNDTLESFRENLNDPRFDYNKFYRKRMEIIYDKQKNFINYYKTQREENPDLIIDDIVKIYLSNEYSKDIDELNSYIEESLNKVTENSGNDVRNFEEFKGGESFKLYEQELVERWNLAAASDILRISALKEVGGVYLDVDMLPGIQPDLFESIEKPSSVTVDFWEMVKLEAIMKYKEYIPGYTSEHFDMLDEEVQSSFESVLASKSDKSEIFSSLGDMEASPLEVKIAFNSKGIINQGLISVKDSYCSNLIVKQIENRYKILNNSLNPAISEDNDFNTTTNAFIDSIMAEANADNGRFMMELGKYLRVGFFPDVKTTINLSGPEAYAAAYQDLLMFKEGSMNIHLIEADLRNFEISKTNISQSTEQEMASLWSFDDARAKAQFEEYKKNYFEGSLGEDDNLDFSQNTVVDKEYLLEKISSLARSSERGYIHYIVQLQGDKISYEAACNLFAKTPYDSVLFQKNIEDSEIAYYYNPGDGEIQEIDKYKIPSIISDRPKIKLTFIGHGKDEFNTDIFAGLDVDSLSTEIETAIDLAKEDISPKSIEINLLGCNMFSYSVNVEETYPGKLLLRVKDKVSELMPSISQDSIIVSANQYEVRINSEGRRELLDHSGEWINKEESIIKDISSKEYISFNPKENKIIVKSKNLPELSTLLQEIRNNSNSSDIELEEKVMLAECEINVISNIDTQVVEGRIEEAKSLTSDSINYIKNEFKLIESISDALYDLKQQNELEESHFISFEDILETDEGFSIRFIDKETGESIFVETEKAIFSEYANHITEEISKIKGTIFDTVNGKLVKKVNLDATHEVNTLNAAFFIQSLIEYNSSKESLSNLSVAMKVQVYAQLFSTGLNTITDAAKVVELVSTALDETIDLLPTLSEGLPVIATIIDGVSLGAAIKELSETSDPLLRQEIEAKIGIMAVNLTAATTAIITSSLGIASGFSILLVPLAGISAGIPSLVNNELILRDKATKVVDYFSHISLAESEGAFTSLDDKIMMPQDDLVISEIDFNNNSITLGKCEIWRMEGGSGHTVTDDIDHFFSAPSITYREPHLSIYDVLEVQKEELDLSKDLMVLPNAPNRVFAWETGWTPGLRSLENDGTKLLDRIRDNYEGEFYWRYFAFIADALITTLKPRYEDTNIRINLDSNTRSFIVPVITTEYIREKLSYSFYGSGGTYALSLSQYNMNINIELNENDTWVIDVDNVVRDVTIESDKIKKGDLIENILSKLSIEDNKIILDNHEINFSGTLNGGNGFVSLTFSILEGINAVIEVDLLSKSYKVLISGELKTLMANSNSVQQKIDYIGLNSELQKNIPYSFMDDKGKENGFINCSTKEGLFVSELSDVVLISKVYMDNSKPLFGYCSNDLKDVKVITKDDVIILTGYYLKDDIKISLSFTIQDENTIKLNGVYLDENGVAEILKFMNKKGSTNTSDSLMSFLESMNIKSIFINSLQSNTKLILDTNFIISGTTSIGQFEFICDKDNNIQPYFIKFNTLETKYTLYVGNRQNMIVEPNYDLDDSGDISSTVINFSQKYLYGIDSCVNKVIISPNIYTDEINITPIYEANNTYPEVIVLDTNYISEKINININDLSIRYVWSNDGSDFILMSTDEENKVSQVKIRFTNVFKGNTISDKISFNFSDKQDVSINKVISTFTPSYYVEGLLNYDLGLISLYNEKFYINNFGMMVSGLVYINDSLYYFKPPIKNLITGFTTIGDDKYYFNPDNGGAASVGETIIDGKNYYFSQNGVLQTGVFSTEDGFKYFAPADTLDENLEGEAIDFTGKLTIDENVYYFGDNYRAAIEWQTLDDEVYYFSTDTGRAFKGLNQIGDDKFYFNSDGIMQKGFVNINDKTFYFDDSGVMKSGYTEIDGKYFYFAENGEMQIGVFNTADGFKYFAHHDEDLGNEEGEALSYSGILNFNNKIYYFDDSFTAVVGWKDLEDGSKYYFDEDTAEAYIGISIINDGKYYFNDSGIMQIGFVTINNEVFYFSDSGIVESGMQNIDDNYFYIDENGLVQIGVFDTSDGYKYFAPANTVNDNIYGQAVEYSGLVRVGEDVYYFGETYTIETGWIYDMENESDKYYFDPETKKAYKGINVIDDIKYYFDENGIMRTGLITFEDNHYYFNEDGIMQYGYLNIEDKTFYFSEDGIMQIGVFNTPDGFKYFAHQNTLDENFEGESINYTGWLDLDEKRYYFTDEYIAATGSVIIDGEEYYFDPDTAQLVISE

SEQ ID NO: 22 - DNA, 7101 bp, Clostridium difficile
atgagtttagttaatagaaaacagttagaaaaaatggcaaatgtaagatttcgtgttcaggaagatgaatatgtagcaatattggatgctttagaagaatatcataatatgtcagagaatactgtagtcgaaaaatatttaaaattaaaagatataaatagtttaacagatatttatatagatacatataaaaagtctggtagaaataaagccttaaaaaaatttaaggaatacctagttacagaagtattagagctaaagaataataatttaactccagttgagaaaaatttacattttgtttggattggaggtcaaataaatgacactgctattaattatataaatcaatggaaagatgtaaatagtgattataatgttaatgttttttatgatagtaatgcatttttgataaacacattgaaaaaaactatagtagaatcagcaacaaatgatacacttgaatcatttagagaaaacttaaatgaccctagatttgactataataaattttacagaaaacgtatggagataatctatgataagcagaaaaatttcataaattactataaaactcaaagagaagaaaatcctgaccttataattgatgatattgtaaagatatatctttcaaacgagtattcaaaggatatagatgaacttaattcctatattgaagagtcattaaataaagttacagaaaatagtgggaatgatgttagaaactttgaagaatttaaaggtggagagtcattcaaattatatgaacaagagttggtagaaagatggaatttggcagctgcttctgacatattaagaatatctgccttaaaagaagttggtggtgtatatttagatgttgatatgttaccaggaatacaaccagacctatttgagtctatagagaaacctagttcagtaacagtggatttttgggaaatggtaaaattagaagctataatgaaatacaaagaatacataccaggatatacttcagagcattttgatatgttggatgaagaagttcaaagtagttttgaatctgttctagcttctaagtcagataagtcagaaatattctcatcacttggcgatatggaggcatcaccactagaagttaaaattgcatttaatagtaaaggtattataaatcaaggactaatttctgtgaaagactcatattgtagcaatttaatagtaaaacaaatcgagaacagatataagatattgaataatagtttaaatccagctattagcgaggataacgatttcaatactacaacgaatgcttttattgatagtataatggctgaagctaatgcagataatggtagatttatgatggaactaggaaagtatttaagagttggtttcttcccagatgttaaaactactattaacttaagtggccctgaagcatatgcggcagcttatcaagatttattaatgtttaaagaaggtagtatgaatatccatttgatagaagctgacttaagaaactttgaaatctctaaaactaatatttctcaatcaactgaacaagaaatggctagcttatggtcatttgacgatgcaagagctaaagctcaatttgaagaatacaaaaaaaattactttgaaggttctcttggagaagatgacaatcttgacttttctcaaaatacagtagttgacaaggagtatcttttagaaaaaatatcttcattagcaagaagttcagagagaggatatatacactatattgttcagttacaaggagataaaattagttatgaagcagcatgtaacttatttgcaaagactccttatgatagtgtactgtttcagaaaaatatagaagattcagaaattgcatattattataatcctggagatggtgaaatacaagaaatagacaagtataaaattccaagtataatttctgatagacctaagattaaattaacatttattggtcatggtaaagatgaatttaatactgatatatttgcaggtcttgatgtagattcattatccacagaaatagaaacagcaatagatttagctaaagaggatatttctcctaagtcaatagaaataaacttactgggatgtaacatgtttagctattctgtaaatgtagaggagacttatcctgggaaattattacttagagttaaagataaagtatcagaattaatgccatctataagtcaagactctattatagtaagtgcaaatcaatatgaagttagaataaatagtgaaggaagaagagaattattggatcattctggtgaatggataaataaagaagaaagtattataaaggatatttcatcaaaagaatatatatcatttaatcctaaagaaaataaaattatagtaaaatctaaaaatttacctgaattatctacattattacaagaaattagaaacaattctaattcaagtgatattgaactagaagaaaaagtaatgttagcagaatgtgagataaatgttatttcaaatatagatacacaagtggtagaaggaaggattgaagaagctaaaagcttaacttctgactctattaattatataaagaatgaatttaaactaatagaatctatttctgatgcactatacgatttaaaacaacagaatgaattagaagagtctcattttatatcttttgaggatatattggagactgatgaaggctttagtataagatttattgataaagaaactggagaatctatatttgtagaaactgaaaaggcaatattctctgaatatgctaatcatataactgaagagatttctaagataaaaggtactatatttgatactgtaaatggtaagttagtaaaaaaagtaaatttagatgctacacatgaagtgaatactttaaatgctgcattttttatacaatcattaatagaatataatagttctaaagaatctcttagtaatttaagtgtagcaatgaaagttcaagtttatgctcaattatttagtactggtttaaatactattacagatgcagccaaagttgttgaattagtatcaactgcattagatgaaactatagatttacttcctacattatctgaaggattacctgtaattgcaactatcatagatggtgtaagtttaggtgcagcaatcaaagagctaagtgaaacaagtgacccattattaagacaagaaatagaagctaagataggtataatggcagtaaatttaacagcagctacaactgcaatcattacttcatctttaggaatagctagtggatttagtatacttttagttcctttagcaggaatttcagcaggtataccaagtttagtaaacaatgagcttatcctaagagataaagcaacaaaagttgtagattattttagtcatatatcattagctgagtctgaaggagcatttacttcattagatgataaaataatgatgccacaagatgatttagtaatatctgagatagactttaataacaattcaataactttaggtaaatgtgaaatctggagaatggaaggtggctcaggtcatactgtaactgatgatatagatcacttcttttcagcaccatcaataacatatagagagccacacttatctatatatgacgtattggaagtacaaaaagaagaacttgatttgtcaaaagatttaatggtattacctaatgctccaaatagagtatttgcttgggaaacaggatggacaccaggtttaagaagcttagaaaatgatggcacaaaactgttagaccgtataagagataactatgaaggtgagttttattggagatattttgcttttatagctgatgctttaataacaacattaaaaccaagatatgaagatactaatataagaataaatttagatagtaatactagaagctttatagtcccagtgataactacagaatatataagagagaaattatcatattctttttatggttctggaggaacttatgcattatctctttctcaatacaatatgaatataaacatagaattaaatgaaaatgatacttgggttatagatgtcgacaatgtcgtaagagatgtcactatagaatctgataaaattaaaaaaggagatttaatagagaatattttatctaaattaagtattgaagacaataaaattattttagataatcatgaaattaatttctctggaacattaaatggaggtaatggatttgtatctttaacattctcaatcttagaaggaataaatgcagttatagaagttgatttattatctaaatcatataaagttcttatttctggtgaactaaaaacattgatggcaaattcaaattctgttcaacagaaaatagattatataggattgaacagcgaattacaaaaaaatataccttatagttttatggatgataaaggaaaagaaaatggatttattaattgttctacaaaagaaggtttatttgtatctgaattatctgatgtagttcttataagtaaagtttatatggacaatagtaaacctctatttggatattgtagtaatgatttgaaagatgttaaagtcataactaaagatgacgttattatattaacaggatattatttaaaagatgatataaaaatctctctttcttttactatacaagatgaaaatactataaaattaaatggagtatatttagatgaaaatggagtagctgaaatattgaaatttatgaataaaaaaggtagtacaaatacttcagattctttaatgagctttttagaaagtatgaatataaaaagtattttcataaattccttacaatctaatactaagcttatattagatactaattttataataagtggtactacttctattggtcaatttgagtttatttgtgataaagataataatatacaaccatatttcattaagtttaatacactagaaactaaatatactctatatgtaggtaatagacaaaatatgatagtagaaccaaattatgatttagatgattctggagatatatcttcaactgtcattaatttttctcagaaatacctttatggaatagacagttgtgttaataaagttataatttcgccaaatatatatacagatgaaataaacataacacctatatatgaagcaaataatacttatccagaagtgattgtattagatacaaattatataagtgaaaaaatcaatattaatatcaatgatttatctatacgatatgtatggagtaatgatggaagtgattttattcttatgtcaactgatgaagagaacaaggtatcacaagttaaaataagatttactaatgtttttaaaggtaatactatatcagataagatatcttttaattttagtgataagcaagatgtatctataaataaagttatttcaacatttacaccttcatattatgtggaaggattacttaattatgatttaggtctgatttctttatacaatgagaaattttatattaataactttggaatgatggtgtctggattagtatatattaatgattcattatattatttcaagccaccaataaagaacttgataactggatttacaactataggtgatgataaatactactttaatccagataatggtggagctgcttcagtcggagaaacaataattgatggcaaaaactactacttcagccaaaatggagtgttacaaacaggtgtatttagtacagaagatggatttaaatattttgctccagcagatacacttgatgaaaatctagagggggaagcaattgattttactggcaaactaactattgatgaaaatgtttattattttggagataattatagagcagctatagaatggcaaacattagatgatgaagtgtactattttagtacagatacaggtagagcttttaaagggctaaatcaaataggtgatgataaattctatttcaactctgatggtattatgcaaaaaggatttgttaatataaatgataagacattctattttgatgattctggtgtgatgaagtcaggatatactgaaatagatggaaaatatttttactttgctgagaatggagaaatgcaaataggagtatttaatacagcagatggatttaaatattttgctcatcatgatgaagatttaggaaatgaagaaggtgaagcactttcatattctggtatacttaattttaacaataagatttattattttgatgattcatttacagcagtagttggatggaaggatttagaagatggttcaaaatattactttgatgaagatacagcagaagcatatataggtatctcaataattaatgatggtaaatattattttaatgattctggaatcatgcaaattggatttgtcacaataaataatgaagtattttatttctctgattctggaatagtagaatctggaatgcaaaatatagatgataattatttctatatagacgaaaatggtctagttcaaattggtgtatttgacacttcagatggatataaatactttgcaccagctaatactgtaaatgataatatctatggacaagcagttgaatatagtggtttagttagagttggtgaagatgtatattattttggagaaacatatacaattgagactggttggatatatgatatggaaaatgaaagtgataaatattatttcgatccagaaactaaaaaagcatataaaggtattaatgtaattgatgatataaaatactattttgatgagaatggaataatgagaacaggtcttataacatttgaagataatcattactattttaatgaagatggtattatgcaatatggttatctaaatatagaagataagacgttctactttagtgaagatggtattatgcagattggagtatttaatacaccagatggatttaaatattttgcacatcaaaatactttagatgagaattttgagggagaatcaataaactatactggttggttagatttagatgaaaagagatattattttacagatgaatatattgcagcaactggttcagttattattgatggtgaggagtattattttgatcctgatacagctcaattagtgattagtgaatag

SEQ ID NO: 23 - protein, 2366 aa, Clostridium difficile; identical to SEQ ID NO: 21

SEQ ID NO: 24 - DNA, 7101 bp, Clostridium difficile; identical to SEQ ID NO: 22

SEQ ID NO: 25 - protein, 2366 aa, Clostridium difficile; identical to SEQ ID NO: 2

SEQ ID NO: 26 - DNA, 7101 bp, Clostridium difficile
atgagtttagttaatagaaaacagttagaaaaaatggcaaatgtaagatttcgtactcaagaagatgaatatgttgcaatattggatgctttagaagaatatcataatatgtcagagaatactgtagtcgaaaaatatttaaaattaaaagatataaatagtttaacagatatttatatagatacatataaaaaatctggtagaaataaagccttaaaaaaatttaaggaatatctagttacagaagtattagagctaaagaataataatttaactccagttgagaaaaatttacattttgtttggattggaggtcaaataaatgacactgctattaattatataaatcaatggaaagatgtaaatagtgattataatgttaatgttttttatgatagtaatgcatttttgataaacacattgaaaaaaactgtagtagaatcagcaataaatgatacacttgaatcatttagagaaaacttaaatgaccctagatttgactataataaattcttcagaaaacgtatggaaataatttatgataaacagaaaaatttcataaactactataaagctcaaagagaagaaaatcctgaacttataattgatgatattgtaaagacatatctttcaaatgagtattcaaaggagatagatgaacttaatacctatattgaagaatccttaaataaaattacacagaatagtggaaatgatgttagaaactttgaagaatttaaaaatggagagtcattcaacttatatgaacaagagttggtagaaaggtggaatttagctgctgcttctgacatattaagaatatctgcattaaaagaaattggtggtatgtatttagatgttgatatgttaccaggaatacaaccagacttatttgagtctatagagaaacctagttcagtaacagtggatttttgggaaatgacaaagttagaagctataatgaaatacaaagaatatataccagaatatacctcagaacattttgacatgttagacgaagaagttcaaagtagttttgaatctgttctagcttctaagtcagataaatcagaaatattctcatcacttggtgatatggaggcatcaccactagaagttaaaattgcatttaatagtaagggtattataaatcaagggctaatttctgtgaaagactcatattgtagcaatttaatagtaaaacaaatcgagaatagatataaaatattgaataatagtttaaatccagctattagcgaggataatgattttaatactacaacgaatacctttattgatagtataatggctgaagctaatgcagataatggtagatttatgatggaactaggaaagtatttaagagttggtttcttcccagatgttaaaactactattaacttaagtggccctgaagcatatgcggcagcttatcaagatttattaatgtttaaagaaggcagtatgaatatccatttgatagaagctgatttaagaaactttgaaatctctaaaactaatatttctcaatcaactgaacaagaaatggctagcttatggtcatttgacgatgcaagagctaaagctcaatttgaagaatataaaaggaattattttgaaggttctcttggtgaagatgataatcttgatttttctcaaaatatagtagttgacaaggagtatcttttagaaaaaatatcttcattagcaagaagttcagagagaggatatatacactatattgttcagttacaaggagataaaattagttatgaagcagcatgtaacttatttgcaaagactccttatgatagtgtactgtttcagaaaaatatagaagattcagaaattgcatattattataatcctggagatggtgaaatacaagaaatagacaagtataaaattccaagtataatttctgatagacctaagattaaattaacatttattggtcatggtaaagatgaatttaatactgatatatttgcaggttttgatgtagattcattatccacagaaatagaagcagcaatagatttagctaaagaggatatttctcctaagtcaatagaaataaatttattaggatgtaatatgtttagctactctatcaacgtagaggagacttatcctggaaaattattacttaaagttaaagataaaatatcagaattaatgccatctataagtcaagactctattatagtaagtgcaaatcaatatgaagttagaataaatagtgaaggaagaagagaattattggatcattctggtgaatggataaataaagaagaaagtattataaaggatatttcatcaaaagaatatatatcatttaatcctaaagaaaataaaattacagtaaaatctaaaaatttacctgagctatctacattattacaagaaattagaaataattctaattcaagtgatattgaactagaagaaaaagtaatgttaacagaatgtgagataaatgttatttcaaatatagatacgcaaattgttgaggaaaggattgaagaagctaagaatttaacttctgactctattaattatataaaagatgaatttaaactaatagaatctatttctgatgcactatgtgacttaaaacaacagaatgaattagaagattctcattttatatcttttgaggacatatcagagactgatgagggatttagtataagatttattaataaagaaactggagaatctatatttgtagaaactgaaaaaacaatattctctgaatatgctaatcatataactgaagagatttctaagataaaaggtactatatttgatactgtaaatggtaagttagtaaaaaaagtaaatttagatactacacacgaagtaaatactttaaatgctgcattttttatacaatcattaatagaatataatagttctaaagaatctcttagtaatttaagtgtagcaatgaaagtccaagtttacgctcaattatttagtactggtttaaatactattacagatgcagccaaagttgttgaattagtatcaactgcattagatgaaactatagacttacttcctacattatctgaaggattacctataattgcaactattatagatggtgtaagtttaggtgcagcaatcaaagagctaagtgaaacgagtgacccattattaagacaagaaatagaagctaagataggtataatggcagtaaatttaacaacagctacaactgcaatcattacttcatctttggggatagctagtggatttagtatacttttagttcctttagcaggaatttcagcaggtataccaagcttagtaaacaatgaacttgtacttcgagataaggcaacaaaggttgtagattattttaaacatgtttcattagttgaaactgaaggagtatttactttattagatgataaaataatgatgccacaagatgatttagtgatatcagaaatagattttaataataattcaatagttttaggtaaatgtgaaatctggagaatggaaggtggttcaggtcatactgtaactgatgatatagatcacttcttttcagcaccatcaataacatatagagagccacacttatctatatatgacgtattggaagtacaaaaagaagaacttgatttgtcaaaagatttaatggtattacctaatgctccaaatagagtatttgcttgggaaacaggatggacaccaggtttaagaagcttagaaaatgatggcacaaaactgttagaccgtataagagataactatgaaggtgagttttattggagatattttgcttttatagctgatgctttaataacaacattaaaaccaagatatgaagatactaatataagaataaatttagatagtaatactagaagttttatagttccaataataactacagaatatataagagaaaaattatcatattctttctatggttcaggaggaacttatgcattgtctctttctcaatataatatgggtataaatatagaattaagtgaaagtgatgtttggattatagatgttgataatgttgtgagagatgtaactatagaatctgataaaattaaaaaaggtgatttaatagaaggtattttatctacactaagtattgaagagaataaaattatcttaaatagccatgagattaatttttctggtgaggtaaatggaagtaatggatttgtttctttaacattttcaattttagaaggaataaatgcaattatagaagttgatttattatctaaatcatataaattacttatttctggcgaattaaaaatattgatgttaaattcaaatcatattcaacagaaaatagattatataggattcaatagcgaattacagaaaaatataccatatagctttgtagatagtgaaggaaaagagaatggttttattaatggttcaacaaaagaaggtttatttgtatctgaattacctgatgtagttcttataagtaaggtttatatggatgatagtaagccttcatttggatattatagtaataatttgaaagatgtcaaagttataactaaagataatgttaatatattaacaggttattatcttaaggatgatataaaaatctctctttctttgactctacaagatgaaaaaactataaagttaaatagtgtgcatttagatgaaagtggagtagctgagattttgaagttcatgaatagaaaaggtaatacaaatacttcagattctttaatgagctttttagaaagtatgaatataaaaagtattttcgttaatttcttacaatctaatattaagtttatattagatgctaattttataataagtggtactacttctattggccaatttgagtttatttgtgatgaaaatgataatatacaaccatatttcattaagtttaatacactagaaactaattatactttatatgtaggaaatagacaaaatatgatagtggaaccaaattatgatttagatgattctggagatatatcttcaactgttatcaatttctctcaaaagtatctttatggaatagacagttgtgttaataaagttgtaatttcaccaaatatttatacagatgaaataaatataacgcctgtatatgaaacaaataatacttatccagaagttattgtattagatgcaaattatataaatgaaaaaataaatgttaatatcaatgatctatctatacgatatgtatggagtaatgatggtaatgattttattcttatgtcaactagtgaagaaaataaggtgtcacaagttaaaataagattcgttaatgtttttaaagataagactttggcaaataagctatcttttaactttagtgataaacaagatgtacctgtaagtgaaataatcttatcatttacaccttcatattatgaggatggattgattggctatgatttgggtctagtttctttatataatgagaaattttatattaataactttggaatgatggtatctggattaatatatattaatgattcattatattattttaaaccaccagtaaataatttgataactggatttgtgactgtaggcgatgataaatactactttaatccaattaatggtggagctgcttcaattggagagacaataattgatgacaaaaattattatttcaaccaaagtggagtgttacaaacaggtgtatttagtacagaagatggatttaaatattttgccccagctaatacacttgatgaaaacctagaaggagaagcaattgattttactggaaaattaattattgacgaaaatatttattattttgatgataattatagaggagctgtagaatggaaagaattagatggtgaaatgcactattttagcccagaaacaggtaaagcttttaaaggtctaaatcaaataggtgattataaatactatttcaattctgatggagttatgcaaaaaggatttgttagtataaatgataataaacactattttgatgattctggtgttatgaaagtaggttacactgaaatagatggcaagcatttctactttgctgaaaacggagaaatgcaaataggagtatttaatacagaagatggatttaaatattttgctcatcataatgaagatttaggaaatgaagaaggtgaagaaatctcatattctggtatattaaatttcaataataaaatttactattttgatgattcatttacagctgtagttggatggaaagatttagaggatggttcaaagtattattttgatgaagatacagcagaagcatatataggtttgtcattaataaatgatggtcaatattattttaatgatgatggaattatgcaagttggatttgtcactataaatgataaagtcttctacttctctgactctggaattatagaatctggagtacaaaacatagatgacaattatttctatatagatgataatggtatagttcaaattggtgtatttgatacttcagatggatataaatattttgcacctgctaatactgtaaatgataatatttacggacaagcagttgaatatagtggtttagttagagttggggaagatgtatattattttggagaaacatatacaattgagactggatggatatatgatatggaaaatgaaagtgataaatattatttcaatccagaaactaaaaaagcatgcaaaggtattaatttaattgatgatataaaatattattttgatgagaagggcataatgagaacgggtcttatatcatttgaaaataataattattactttaatgagaatggtgaaatgcaatttggttatataaatatagaagataagatgttctattttggtgaagatggtgtcatgcagattggagtatttaatacaccagatggatttaaatactttgcacatcaaaatactttggatgagaattttgagggagaatcaataaactatactggttggttagatttagatgaaaagagatattattttacagatgaatatattgcagcaactggttcagttattattgatggtgaggagtattattttgatcctgatacagctcaattagtgattagtgaatag

SEQ ID NO: 27 - DNA, 26039 bp, Clostridium difficile
agctagtcttggtgtattgttagcaggattttttaatttgccaattgaattagttgcagccgttggctatgctagtgtctttggtagtgctacaaatactttttttgcacctgtatttataggggcagaagtttttggatacagctatttaccttatttctttgtagtatgcgctatttcatatatatttaatatggataaatctatttattcactacaaaaaatttcaacaaaacaataaataaaacaacataatgtatgattagaagagaaagaatattagagaaaggatagggtaggaatatgttgacaagtttagctttgatttttttattaggaatggcctcgggaggtatttttaagaggataaagttacctaacttattgggaatgttacttacaggaattatattaggtccatatgttttaaatttgattgataattcaatactagatatttcttctgaccttagaaagattgcattgattattatattaacaagggctggattatctttagatataaacgatttgaagaaagtgggaagacctgctgtacttatgtgctttattccagctacttttgaaattatcggaatgatagttttagcaccaaagttactaggcgtttctatattggaagcagcagtcatgggtgcagtagtaggagcagtttctcctgcaattattgtacctaaaatgcttaaattaatggaagaaggttatggtacagaaaaaagtattccacagatgcttttagcaggaacttctatagacgatattttcgtaattgtgatgtttacagtattcacaggattggcacaaggaaatagtatatcagctattagttttttacaaattccagtatcaattatattaggtgtaatagctggagcagtgattggaatctgtttagcagtattttttaagaaggttcatatgagagattctgctaaaggggtgttgcttttaagtatctcatttttaatgataagtttagaaactgctttagagggtattgtgccattttctggattattagcagttatgagtattgggattttccttcagataaaatatcgtgtagttgcaagaagattgtctataaagtattcaaaactatgggttggcgctgaaattctcttgtttgttttggtaggggcaacagtagatataagttatgcatttaaagcaggaattggagctgtaattttaatatttggagttcttttattccgtatgtaggagtattcttctgccttattaagacaaatttgacaataaaggaaagattgttctgtatgattggctatattccaaaggctacagtacaggcagcaataggaggtgtaccacttgcaatggggatggcatctggacaacttattttgacgttagcagttctcgctatacttataactgcacctcttggagcttttggaattgatgtaacttataaaaaattattaacttctgtaaaaggcgagagtaagtaaaaataaagattattttaactggtaagttatattttggaaaaggattatactattgaatacaatataaaaaaatcatttgggagattaagaaggtagaagttaagaacagattttaaggtatgttatgattattagaattgattttgtgaaattattattgtaatatttaattatatagataaagaagcggagtgataactatgtgtttaaaaaaattatcaaaattagagttagttattatgaaatttatttggaatttagatataaaaaccaattcatatgagattattgattatatgaaagaagaacataatttaccagaaaaagtagctttaaaaactttatcaaaactatcaaagaaaaaattcttatatgttcaagaaacaggcaagtgtatgtattatacagttgcaataaaagaaaaggcatatttagagtttatatcaagaaatgtgcaaaatcttttgaagaataattttataaggaatttattagtatcatttcacgaagaggagctaacagaggaaaagataaagtcgttagaaaactgggtagtaaattgggaagaagcttatgtataaatgttattatttttattacaatttagataattttggttttgtaagctctgcaactatttttagatggttgcagagtttatttttattttttattcccttaagcaatacttaaaagtaaacgcatttatatttactaacttcaattacttctaatacttaaattactttttaaaaatattttgatatgtcatctctatagtaatctagaacttgtttctattctttatataaagtttttatgaatgatatatataatattcgttcatttgattaaaaataacaaaatattaaataattctactctgatagtttgttaaaaaaataataaaaaatattaataaacaaaaaaaaaattatcttaagagaggagaatgttataatataaaaaggtttctagatttcataaaagatactattttagtcttgaaaatatttagtttgaaaagattttaatttaatgattgattaagttaaaaatgtgtatgtaataaattttattttatttattgactaaattataaagtttacataattatttaataattatgtaattgttacttgaaaattgatctattttaaaatctagttataacttcaaaaaagactgaaaattaagaaaaaagaaatataaatataaaaatatgtcatatagattttttttattttactttaataaaatgatttgtttttacaatactttattaatataaagtttattgctaaaatactttatttattagaaaaagattactaattaattattaaaattaatgtattcataatgcatattttcatataaaatttaatttatttgccgattatataattataattactgatttaattccaatgttgttcaaaattttcaaataaagcatcattataaatataagagagggtgattttatgcaaaagtctttttatgaattaattgttttagcaagaaataactcagtagatgatttgcaagaaattttatttatgtttaagccattagtaaaaaaacttagtagagttttacattatgaagagggagaaacagatttaataatattttttattgaattaataaaaaatattaaattaagtagcttttcagaaaaaagcgatgctattatagtcaaatatattcataaatcattactgaataagacttttgagttgtctagaagatattctaaaatgaagtttaattttgtagaatttgatgaaaatatcttaaatatgaaaaataattatcaaagtaagtctgtttttgaggaagatatttgttttttcgaatatattttgaaagaattatctggtattcaaagaaaagttattttttataaatatttaaaaggatattctgatagagaaatatcagtgaaattaaaaatatctagacaagctgttaataaggctaaaaatagagcatttaaaaaaataaaaaaagactatgaaaattattttaacttgtaattaatgagcttaaagagatatttataatagaaatcaaattttagaattaactttattgtaaaatcaataacttaatctaagaatatcttaatttttatattttatatagaacaaagtttacatatttatttcagacaacgtctttattcaatcgaagagcaaattaatcaactgagtgtcttaaatttaaaatgttaggaagtgaatgtatatgaaaacctaagtagatattagtatattttataaatagaaaggaggatatataaaagagttttagcatttagatgtaaaaatattatagtaaaggagaaaattttatgagtttagttaatagaaaacagttagaaaaaatggcaaatgtaagatttcgtactcaagaagatgaatatgttgcaatattggatgctttagaagaatatcataatatgtcagagaatactgtagtcgaaaaatatttaaaattaaaagatataaatagtttaacagatatttatatagatacatataaaaaatctggtagaaataaagccttaaaaaaatttaaggaatatctagttacagaagtattagagctaaagaataataatttaactccagttgagaaaaatttacattttgtttggattggaggtcaaataaatgacactgctattaattatataaatcaatggaaagatgtaaatagtgattataatgttaatgttttttatgatagtaatgcatttttgataaacacattgaaaaaaactgtagtagaatcagcaataaatgatacacttgaatcatttagagaaaacttaaatgaccctagatttgactataataaattcttcagaaaacgtatggaaataatttatgataaacagaaaaatttcataaactactataaagctcaaagagaagaaaatcctgaacttataattgatgatattgtaaagacatatctttcaaatgagtattcaaaggagatagatgaacttaatacctatattgaagaatccttaaataaaattacacagaatagtggaaatgatgttagaaactttgaagaatttaaaaatggagagtcattcaacttatatgaacaagagttggtagaaaggtggaatttagctgctgcttctgacatattaagaatatctgcattaaaagaaattggtggtatgtatttagatgttgatatgttaccaggaatacaaccagacttatttgagtctatagagaaacctagttcagtaacagtggatttttgggaaatgacaaagttagaagctataatgaaatacaaagaatatataccagaatatacctcagaacattttgacatgttagacgaagaagttcaaagtagttttgaatctgttctagcttctaagtcagataaatcagaaatattctcatcacttggtgatatggaggcatcaccactagaagttaaaattgcatttaatagtaagggtattataaatcaagggctaatttctgtgaaagactcatattgtagcaatttaatagtaaaacaaatcgagaatagatataaaatattgaataatagtttaaatccagctattagcgaggataatgattttaatactacaacgaatacctttattgatagtataatggctgaagctaatgcagataatggtagatttatgatggaactaggaaagtatttaagagttggtttcttcccagatgttaaaactactattaacttaagtggccctgaagcatatgcggcagcttatcaagatttattaatgtttaaagaaggcagtatgaatatccatttgatagaagctgatttaagaaactttgaaatctctaaaactaatatttctcaatcaactgaacaagaaatggctagcttatggtcatttgacgatgcaagagctaaagctcaatttgaagaatataaaaggaattattttgaaggttctcttggtgaagatgataatcttgatttttctcaaaatatagtagttgacaaggagtatcttttagaaaaaatatcttcattagcaagaagttcagagagaggatatatacactatattgttcagttacaaggagataaaattagttatgaagcagcatgtaacttatttgcaaagactccttatgatagtgtactgtttcagaaaaatatagaagattcagaaattgcatattattataatcctggagatggtgaaatacaagaaatagacaagtataaaattccaagtataatttctgatagacctaagattaaattaacatttattggtcatggtaaagatgaatttaatactgatatatttgcaggttttgatgtagattcattatccacagaaatagaagcagcaatagatttagctaaagaggatatttctcctaagtcaatagaaataaatttattaggatgtaatatgtttagctactctatcaacgtagaggagacttatcctggaaaattattacttaaagttaaagataaaatatcagaattaatgccatctataagtcaagactctattatagtaagtgcaaatcaatatgaagttagaataaatagtgaaggaagaagagaattattggatcattctggtgaatggataaataaagaagaaagtattataaaggatatttcatcaaaagaatatatatcatttaatcctaaagaaaataaaattacagtaaaatctaaaaatttacctgagctatctacattattacaagaaattagaaataattctaattcaagtgatattgaactagaagaaaaagtaatgttaacagaatgtgagataaatgttatttcaaatatagatacgcaaattgttgaggaaaggattgaagaagctaagaatttaacttctgactctattaattatataaaagatgaatttaaactaatagaatctatttctgatgcactatgtgacttaaaacaacagaatgaattagaagattctcattttatatcttttgaggacatatcagagactgatgagggatttagtataagatttattaataaagaaactggagaatctatatttgtagaaactgaaaaaacaatattctctgaatatgctaatcatataactgaagagatttctaagataaaaggtactatatttgatactgtaaatggtaagttagtaaaaaaagtaaatttagatactacacacgaagtaaatactttaaatgctgcattttttatacaatcattaatagaatataatagttctaaagaatctcttagtaatttaagtgtagcaatgaaagtccaagtttacgctcaattatttagtactggtttaaatactattacagatgcagccaaagttgttgaattagtatcaactgcattagatgaaactatagacttacttcctacattatctgaaggattacctataattgcaactattatagatggtgtaagtttaggtgcagcaatcaaagagctaagtgaaacgagtgacccattattaagacaagaaatagaagctaagataggtataatggcagtaaatttaacaacagctacaactgcaatcattacttcatctttggggatagctagtggatttagtatacttttagttcctttagcaggaatttcagcaggtataccaagcttagtaaacaatgaacttgtacttcgagataaggcaacaaaggttgtagattattttaaacatgtttcattagttgaaactgaaggagtatttactttattagatgataaaataatgatgccacaagatgatttagtgatatcagaaatagattttaataataattcaatagttttaggtaaatgtgaaatctggagaatggaaggtggttcaggtcatactgtaactgatgatatagatcacttcttttcagcaccatcaataacatatagagagccacacttatctatatatgacgtattggaagtacaaaaagaagaacttgatttgtcaaaagatttaatggtattacctaatgctccaaatagagtatttgcttgggaaacaggatggacaccaggtttaagaagcttagaaaatgatggcacaaaactgttagaccgtataagagataactatgaaggtgagttttattggagatattttgcttttatagctgatgctttaataacaacattaaaaccaagatatgaagatactaatataagaataaatttagatagtaatactagaagttttatagttccaataataactacagaatatataagagaaaaattatcatattctttctatggttcaggaggaacttatgcattgtctctttctcaatataatatgggtataaatatagaattaagtgaaagtgatgtttggattatagatgttgataatgttgtgagagatgtaactatagaatctgataaaattaaaaaaggtgatttaatagaaggtattttatctacactaagtattgaagagaataaaattatcttaaatagccatgagattaatttttctggtgaggtaaatggaagtaatggatttgtttctttaacattttcaattttagaaggaataaatgcaattatagaagttgatttattatctaaatcatataaattacttatttctggcgaattaaaaatattgatgttaaattcaaatcatattcaacagaaaatagattatataggattcaatagcgaattacagaaaaatataccatatagctttgtagatagtgaaggaaaagagaatggttttattaatggttcaacaaaagaaggtttatttgtatctgaattacctgatgtagttcttataagtaaggtttatatggatgatagtaagccttcatttggatattatagtaataatttgaaagatgtcaaagttataactaaagataatgttaatatattaacaggttattatcttaaggatgatataaaaatctctctttctttgactctacaagatgaaaaaactataaagttaaatagtgtgcatttagatgaaagtggagtagctgagattttgaagttcatgaatagaaaaggtaatacaaatacttcagattctttaatgagctttttagaaagtatgaatataaaaagtattttcgttaatttcttacaatctaatattaagtttatattagatgctaattttataataagtggtactacttctattggccaatttgagtttatttgtgatgaaaatgataatatacaaccatatttcattaagtttaatacactagaaactaattatactttatatgtaggaaatagacaaaatatgatagtggaaccaaattatgatttagatgattctggagatatatcttcaactgttatcaatttctctcaaaagtatctttatggaatagacagttgtgttaataaagttgtaatttcaccaaatatttatacagatgaaataaatataacgcctgtatatgaaacaaataatacttatccagaagttattgtattagatgcaaattatataaatgaaaaaataaatgttaatatcaatgatctatctatacgatatgtatggagtaatgatggtaatgattttattcttatgtcaactagtgaagaaaataaggtgtcacaagttaaaataagattcgttaatgtttttaaagataagactttggcaaataagctatcttttaactttagtgataaacaagatgtacctgtaagtgaaataatcttatcatttacaccttcatattatgaggatggattgattggctatgatttgggtctagtttctttatataatgagaaattttatattaataactttggaatgatggtatctggattaatatatattaatgattcattatattattttaaaccaccagtaaataatttgataactggatttgtgactgtaggcgatgataaatactactttaatccaattaatggtggagctgcttcaattggagagacaataattgatgacaaaaattattatttcaaccaaagtggagtgttacaaacaggtgtatttagtacagaagatggatttaaatattttgccccagctaatacacttgatgaaaacctagaaggagaagcaattgattttactggaaaattaattattgacgaaaatatttattattttgatgataattatagaggagctgtagaatggaaagaattagatggtgaaatgcactattttagcccagaaacaggtaaagcttttaaaggtctaaatcaaataggtgattataaatactatttcaattctgatggagttatgcaaaaaggatttgttagtataaatgataataaacactattttgatgattctggtgttatgaaagtaggttacactgaaatagatggcaagcatttctactttgctgaaaacggagaaatgcaaataggagtatttaatacagaagatggatttaaatattttgctcatcataatgaagatttaggaaatgaagaaggtgaagaaatctcatattctggtatattaaatttcaataataaaatttactattttgatgattcatttacagctgtagttggatggaaagatttagaggatggttcaaagtattattttgatgaagatacagcagaagcatatataggtttgtcattaataaatgatggtcaatattattttaatgatgatggaattatgcaagttggatttgtcactataaatgataaagtcttctacttctctgactctggaattatagaatctggagtacaaaacatagatgacaattatttctatatagatgataatggtatagttcaaattggtgtatttgatacttcagatggatataaatattttgcacctgctaatactgtaaatgataatatttacggacaagcagttgaatatagtggtttagttagagttggggaagatgtatattattttggagaaacatatacaattgagactggatggatatatgatatggaaaatgaaagtgataaatattatttcaatccagaaactaaaaaagcatgcaaaggtattaatttaattgatgatataaaatattattttgatgagaagggcataatgagaacgggtcttatatcatttgaaaataataattattactttaatgagaatggtgaaatgcaatttggttatataaatatagaagataagatgttctattttggtgaagatggtgtcatgcagattggagtatttaatacaccagatggatttaaatactttgcacatcaaaatactttggatgagaattttgagggagaatcaataaactatactggttggttagatttagatgaaaagagatattattttacagatgaatatattgcagcaactggttcagttattattgatggtgaggagtattattttgatcctgatacagctcaattagtgattagtgaatagataaaaatatgttaaatatatcctcttatacttaaatatataaaaataaacaaaatgatacactacataaagtgttctatctaatatgaagatttaccaataaaaaggtggactatgatgaatgcacagtagttcacctttttatatttctaatggtaacaaaatatttttttatataaacctaggaggcgttatgaatatgacaatatcttttttatcagagcatatatttataaagttagtaattttaactatatcatttgatacattattaggatgtttaagtgcaataaaaagtcgtaaatttaattctagttttggaatagatggaggaatcagaaaagtagcaatgatagcatgtatattttttttatcagtagttgacattcttacaaagtttaactttttatttatgttaccacaagattgtatcaattttttaagactaaaacatcttggaatatctgaatttttctctattttatttattttatatgaaagtgtaagtatattaaaaaatatgtgcttatgtggattaccagtacctaagagattaaaggaaaaaatagcaattttactagatgcaatgacagatgaaatgaatgctaaggatgaaaagtaagtaatggtagatataataaagatattaacaaataaaaagtgttatccaaataagaatagctgaaagttatcataattcatgaaactaataatgaaaacgagggagcagatgccaagagacacacaagtattaaatacatataatttcgaagcaagtgttcattactatatagatgacaaggtagtatatcaaacattggttcacaaagatggtgcatggtcagttggtaaaatctattaagctacattagttacagatatcacaaactataatagttaaacatagaaatatgtgtaaattgtgatggaaattattcaaaaacacaaaaatacgtgatgaaggacaaaatgatatagaaaataagtatcaaaccttaataaatgatttaattgatagtttaaaagttataggaaaaatatataaagaaataaaaacattaaaaaaatataagatatgtttacaaattactatcagacaatctccttatctaatagaagagtcaattaactaattgagtatctttaaattgaaatgttaggaagtgatttaaatatgaaaacttaaattataaaaaatcaatattaatttatttttaaaaaatagaaaggagtgtataagatttattttcaaagtttaaaaacaagaaaatcaatttaaatttcagaaggaataaatgtggttatagaagtggatttattatcaaaaataataatactaggaggtttttatgtctttaatatctaaagaagagttaataaaactcgcatatagcattagaccaagagaaaatgagtataaaactatactaactaatttagacgaatataataagttaactacaaacaataatgaaaataaatatttgcaattaaaaaaactaaatgaatcaattgatgtttttatgaataaatataaaacttcaagcagaaatagagcactctctaatctaaaaaaagatatattaaaagaagtaattcttattaaaaattccaatacaagccctgtagaaaaaaatttacattttgtatggataggtggagaagtcagtgatattgctcttgaatacataaaacaatgggctgatattaatgcagaatataatattaaactgtggtatgatagtgaagcattcttagtaaatacactaaaaaaggctatagttgaatcttctaccactgaagcattacagctactagaggaagagattcaaaatcctcaatttgataatatgaaattttacaaaaaaaggatggaatttatatatgatagacaaaaaaggtttataaattattataaatctcaaatcaataaacctacagtacctacaatagatgatattataaagtctcatctagtatctgaatataatagagatgaaactgtattagaatcatatagaacaaattctttgagaaaaataaatagtaatcatgggatagatatcagggctaatagtttgtttacagaacaagagttattaaatatttatagtcaggagttgttaaatcgtggaaatttagctgcagcatctgacatagtaagattattagccctaaaaaattttggcggagtatatttagatgttgatatgcttccaggtattcactctgatttatttaaaacaatatctagacctagctctattggactagaccgttgggaaatgataaaattagaggctattatgaagtataaaaaatatataaataattatacatcagaaaactttgataaacttgatcaacaattaaaagataattttaaactcattatagaaagtaaaagtgaaaaatctgagatattttctaaattagaaaatttaaatgtatctgatcttgaaattaaaatagctttcgctttaggcagtgttataaatcaagccttgatatcaaaacaaggttcatatcttactaacctagtaatagaacaagtaaaaaatagatatcaatttttaaaccaacaccttaacccagccatagagtctgataataacttcacagatactactaaaatttttcatgattcattatttaattcagctaccgcagaaaactctatgtttttaacaaaaatagcaccatacttacaagtaggttttatgccagaagctcgctccacaataagtttaagtggtccaggagcttatgcgtcagcttactatgatttcataaatttacaagaaaatactatagaaaaaactttaaaagcatcagatttaatagaatttaaattcccagaaaataatctatctcaattgacagaacaagaaataaatagtctatggagctttgatcaagcaagtgcaaaatatcaatttgagaaatatgtaagagattatactggtggatctctttctgaagacaatggggtagactttaataaaaatactgccctcgacaaaaactatttattaaataataaaattccatcaaacaatgtagaagaagctggaagtaaaaattatgttcattatatcatacagttacaaggagatgatataagttatgaagcaacatgcaatttattttctaaaaatcctaaaaatagtattattatacaacgaaatatgaatgaaagtgcaaaaagctactttttaagtgatgatggagaatctattttagaattaaataaatataggatacctgaaagattaaaaaataaggaaaaagtaaaagtaacctttattggacatggtaaagatgaattcaacacaagcgaatttgctagattaagtgtagattcactttccaatgagataagttcatttttagataccataaaattagatatatcacctaaaaatgtagaagtaaacttacttggatgtaatatgtttagttatgattttaatgttgaagaaacttatcctgggaagttgctattaagtattatggacaaaattacttccactttacctgatgtaaataaaaattctattactataggagcaaatcaatatgaagtaagaattaatagtgagggaagaaaagaacttctggctcactcaggtaaatggataaataaagaagaagctattatgagcgatttatctagtaaagaatacattttttttgattctatagataataagctaaaagcaaagtccaagaatattccaggattagcatcaatatcagaagatataaaaacattattacttgatgcaagtgttagtcctgatacaaaatttattttaaataatcttaagcttaatattgaatcttctattggggattacatttattatgaaaaattagagcctgttaaaaatataattcacaattctatagatgatttaatagatgagttcaatctacttgaaaatgtatctgatgaattatatgaattaaaaaaattaaataatctagatgagaagtatttaatatcttttgaagatatctcaaaaaataattcaacttactctgtaagatttattaacaaaagtaatggtgagtcagtttatgtagaaacagaaaaagaaattttttcaaaatatagcgaacatattacaaaagaaataagtactataaagaatagtataattacagatgttaatggtaatttattggataatatacagttagatcatacttctcaagttaatacattaaacgcagcattctttattcaatcattaatagattatagtagcaataaagatgtactgaatgatttaagtacctcagttaaggttcaactttatgctcaactatttagtacaggtttaaatactatatatgactctatccaattagtaaatttaatatcaaatgcagtaaatgatactataaatgtactacctacaataacagaggggatacctattgtatctactatattagacggaataaacttaggtgcagcaattaaggaattactagacgaacatgacccattactaaaaaaagaattagaagctaaggtgggtgttttagcaataaatatgtcattatctatagctgcaactgtagcttcaattgttggaataggtgctgaagttactattttcttattacctatagctggtatatctgcaggaataccttcattagttaataatgaattaatattgcatgataaggcaacttcagtggtaaactattttaatcatttgtctgaatctaaaaaatatggccctcttaaaacagaagatgataaaattttagttcctattgatgatttagtaatatcagaaatagattttaataataattcgataaaactaggaacatgtaatatattagcaatggaggggggatcaggacacacagtgactggtaatatagatcactttttctcatctccatctataagttctcatattccttcattatcaatttattctgcaataggtatagaaacagaaaatctagatttttcaaaaaaaataatgatgttacctaatgctccttcaagagtgttttggtgggaaactggagcagttccaggtttaagatcattggaaaatgacggaactagattacttgattcaataagagatttatacccaggtaaattttactggagattctatgcttttttcgattatgcaataactacattaaaaccagtttatgaagacactaatattaaaattaaactagataaagatactagaaacttcataatgccaactataactactaacgaaattagaaacaaattatcttattcatttgatggagcaggaggaacttactctttattattatcttcatatccaatatcaacgaatataaatttatctaaagatgatttatggatatttaatattgataatgaagtaagagaaatatctatagaaaatggtactattaaaaaaggaaagttaataaaagatgttttaagtaaaattgatataaataaaaataaacttattataggcaatcaaacaatagatttttcaggcgatatagataataaagatagatatatattcttgacttgtgagttagatgataaaattagtttaataatagaaataaatcttgttgcaaaatcttatagtttgttattgtctggggataaaaattatttgatatccaatttatctaatactattgagaaaatcaatactttaggcctagatagtaaaaatatagcgtacaattacactgatgaatctaataataaatattttggagctatatctaaaacaagtcaaaaaagcataatacattataaaaaagacagtaaaaatatattagaattttataatgacagtacattagaatttaacagtaaagattttattgctgaagatataaatgtatttatgaaagatgatattaatactataacaggaaaatactatgttgataataatactgataaaagtatagatttctctatttctttagttagtaaaaatcaagtaaaagtaaatggattatatttaaatgaatccgtatactcatcttaccttgattttgtgaaaaattcagatggacaccataatacttctaattttatgaatttatttttggacaatataagtttctggaaattgtttgggtttgaaaatataaattttgtaatcgataaatactttacccttgttggtaaaactaatcttggatatgtagaatttatttgtgacaataataaaaatatagatatatattttggtgaatggaaaacatcgtcatctaaaagcactatatttagcggaaatggtagaaatgttgtagtagagcctatatataatcctgatacgggtgaagatatatctacttcactagatttttcctatgaacctctctatggaatagatagatatataaataaagtattgatagcacctgatttatatacaagtttaataaatattaataccaattattattcaaatgagtactaccctgagattatagttcttaacccaaatacattccacaaaaaagtaaatataaatttagatagttcttcttttgagtataaatggtctacagaaggaagtgactttattttagttagatacttagaagaaagtaataaaaaaatattacaaaaaataagaatcaaaggtatcttatctaatactcaatcatttaataaaatgagtatagattttaaagatattaaaaaactatcattaggatatataatgagtaattttaaatcatttaattctgaaaatgaattagatagagatcatttaggatttaaaataatagataataaaacttattactatgatgaagatagtaaattagttaaaggattaatcaatataaataattcattattctattttgatcctatagaatttaacttagtaactggatggcaaactatcaatggtaaaaaatattattttgatataaatactggagcagctttaactagttataaaattattaatggtaaacacttttattttaataatgatggtgtgatgcagttgggagtatttaaaggacctgatggatttgaatattttgcacctgccaatactcaaaataataacatagaaggtcaggctatagtttatcaaagtaaattcttaactttgaatggcaaaaaatattattttgataataactcaaaagcagtcactggatggagaattattaacaatgagaaatattactttaatcctaataatgctattgctgcagtcggattgcaagtaattgacaataataagtattatttcaatcctgacactgctatcatctcaaaaggttggcagactgttaatggtagtagatactactttgatactgataccgctattgcctttaatggttataaaactattgatggtaaacacttttattttgatagtgattgtgtagtgaaaataggtgtgtttagtacctctaatggatttgaatattttgcacctgctaatacttataataataacatagaaggtcaggctatagtttatcaaagtaaattcttaactttgaatggtaaaaaatattactttgataataactcaaaagcagttaccggattgcaaactattgatagtaaaaaatattactttaatactaacactgctgaagcagctactggatggcaaactattgatggtaaaaaatattactttaatactaacactgctgaagcagctactggatggcaaactattgatggtaaaaaatattactttaatactaacactgctatagcttcaactggttatacaattattaatggtaaacatttttattttaatactgatggtattatgcagataggagtgtttaaaggacctaatggatttgaatattttgcacctgctaatacggatgctaacaacatagaaggtcaagctatactttaccaaaatgaattcttaactttgaatggtaaaaaatattactttggtagtgactcaaaagcagttactggatggagaattattaacaataagaaatattactttaatcctaataatgctattgctgcaattcatctatgcactataaataatgacaagtattactttagttatgatggaattcttcaaaatggatatattactattgaaagaaataatttctattttgatgctaataatgaatctaaaatggtaacaggagtatttaaaggacctaatggatttgagtattttgcacctgctaatactcacaataataacatagaaggtcaggctatagtttaccagaacaaattcttaactttgaatggcaaaaaatattattttgataatgactcaaaagcagttactggatggcaaaccattgatggtaaaaaatattactttaatcttaacactgctgaagcagctactggatggcaaactattgatggtaaaaaatattactttaatcttaacactgctgaagcagctactggatggcaaactattgatggtaaaaaatattactttaatactaacactttcatagcctcaactggttatacaagtattaatggtaaacatttttattttaatactgatggtattatgcagataggagtgtttaaaggacctaatggatttgaatactttgcacctgctaatacggatgctaacaacatagaaggtcaagctatactttaccaaaataaattcttaactttgaatggtaaaaaatattactttggtagtgactcaaaagcagttaccggactgcgaactattgatggtaaaaaatattactttaatactaacactgctgttgcagttactggatggcaaactattaatggtaaaaaatactactttaatactaacacttctatagcttcaactggttatacaattattagtggtaaacatttttattttaatactgatggtattatgcagataggagtgtttaaaggacctgatggatttgaatactttgcacctgctaatacagatgctaacaatatagaaggtcaagctatacgttatcaaaatagattcctatatttacatgacaatatatattattttggtaataattcaaaagcggctactggttgggtaactattgatggtaatagatattacttcgagcctaatacagctatgggtgcgaatggttataaaactattgataataaaaatttttactttagaaatggtttacctcagataggagtgtttaaagggtctaatggatttgaatactttgcacctgctaatacggatgctaacaatatagaaggtcaagctatacgttatcaaaatagattcctacatttacttggaaaaatatattactttggtaataattcaaaagcagttactggatggcaaactattaatggtaaagtatattactttatgcctgatactgctatggctgcagctggtggacttttcgagattgatggtgttatatatttctttggtgttgatggagtaaaagcccctgggatatatggctaaaatatatgtttgataaaaaattattcctgtgctactaagaaattatttttatataataaatattgagatttaattaaaagtcatgtgttattgtaatacatgacttttagttaaaatttttctatcatttaataatctattattcttgactattttataataaaattcatatatggaaatattaatactaaataattaatagttgataaaaaatagataatatgctaaaagcaaaaactaatttagagccttgtaactgtttatttgcaattataaaaacatctttaaacatattgactataatataaaatattaactataatacaaaacaatattaattaattttctctacagctatccctggtatagttatatttccacccatagttgattcataagttatagttccagcacttatacctcttatagttatgtaatcatcctctaatactcttgaaggagttattgattttttataactacatagtacaaccttatcataatttccagacacagctaatcttatttgcacctcatcaccatcttcaataacttgaataaccttaccttcaaatttaccttttgtactataatcatcaggtgttctagctaattggtcataagtaataccagtatcatatcctttcttctcctcttcttcttttttgcgttgttcttcagcctttttagcttcttcagcttttttagcttcttcagctttacgttgattttcagcttcaatagctttcttttcgtcgtctttcattttgaaccatggttcagcatcagacaatttgctatttaaagtttctatttctgttttttgagaatctataactgatgtttggttagaaatgacctcctcatggtcttcagaacaagctggtgaggatatattgccaaaaaacacgcctaaaataaatgccagtagagcaataccctttgtgctcttaaagaatttaattattttcttagagcttccttttccttcattactaaattcgttaccctcattttttttagaaaacataatacaatctcccttttattagatatattttattttaaaagttaaaaacttaaaataactagttgactaaaaattatatattcatattttcctaaaatatatttcccctaagcataattttacaaaataaagtaagaagattcaatatattttgaaaaaataagataaaaatgtcagattataatataattttcttgaaggtgaattttatatattaaattaaacataaagtattttatttgtataaaactatattatgatgtaattaagtgactcagtgatttagaggtggtaaaatatatatatatgaaagagcataaataaattgatataataaaaaattaaatattaaatattaactataataaaaaaatatctggtaataggtataatataaaaagaatataccagaaagaaggtgaagtatgggagaactacaaaaaattccaggggtagggaaagcaacagaaaaatctttaatcatgttaggatatacaactattaaatcacttaaagatgcaaacccagcacaaatgtatgaaaaggaatgtttaatgcgtggacagcacatagacagatgtcagttatatgtatacagatgtgcagtatattttgcatcaactgaaaatccagaaccagaaaaattaaagtggtggtattggaaagattaaaaaatcaaaaaagttagacataaaaaagagttgaatatccgttttaaataataaaaactaatactcaactcttttttagtcgtaaattttatgtaaatctatttgtatggctaaatatacccatcaataaatgtataaatataccaatcaacaaatgactaaacatactacctaacaaaggattaaataaattacttaacaaagcattctaaaacaattaattagaaactgtttcttcaagccattttctacattgctcaatatttaccatagggtcaaaaccttggtcttttcccttatttaaaagcatatcacaagggaaagtatcacattcaccacaatgattaagttccttactttcacagcaagttttaaccttacattctccaccccaaaatggtttttccatagttgggcaaccagtgcaatttacttgttctttttttgtacaactgtcacaacagacaccacatcttgattcaaacatgttcaaacatcctttccattatttaaaaatattataaaatgattttagatgaatacaaaagtgcaaatagttgattttaggtcatctaaatgttaaacataaagttattagtactggtaaatttataaaaactattccaaaaatctttttgaatatttcaaaacacaataaattacttcaaatccctttgaatatattttacagcattatagattgctttaaatctctttgaatattctacaagactatagattagtttaaatctctttgagtattctacaagactatagattagtttaaatccctttgaatatttcaaaacaccatagattactttaaattcctttgaatattctataacactataaattacttttaacttttatataaccataaagtttttatctggcactttaaatggagttttatatcaaatttgccttccatcgaataaccaaacttaatttaattacacattccaagagtcaaatattcattcaatatatttgataattctatgttatagctataattaaatatagattattaaagttaaatatttatttaatatattgaatgattttttacctatatttaattaagtttcattatataatataaaaattgtttttgcattaagttttaatataatacataataattttaaataataatattattatatattttttaattttaggagtatatctattatatagcgagtagataaaacatataaaattcaaataaaagatatatatttttaaattaaaatggatatagatttcaactaaaaagaatataaatttcaaacccaaaaatatctagcatttaccattaagaaataacatcattctttctaaaatttctattggcaatttcagaaaatactatagtagtaataaatgcaacacatattgtaactatagtgtcattaacatttaaagcagattgctttataacccccatacgactacctaacatagaataagggaaaaatataccaacagcaggttttgctactattaatcccataccaaatagagaaaggcaaagactaataccaataggagttgcaaaacttctaatctttatagacatgtataattgtatagaagctattgaaatagaaataatccaacctttagcaatccaaccagtcaattctttaggtacactaccagaaaaaccaaacatatttcctgcaactatataaaagataacaaagaaaacttgtgtaatagctgtaagtattgaaactactgtaagtttagataaaaagatattttttaaattaactggcagtgtcattacattattccaattatgattcatatgttcaagcctacaaatatatgcacaaaagattgcgattaagataggaaagaaaaattccccataaaaaagactaacttgagtccataagctgtaccattcttttttgagtatgccttgatttagataaaaattaccagaaccaatcaacacacttataagtggcaaagctagtaatacataccatataaaagaattttttaactttagaatttctcccaaaactgacttccttaacatttaaatccctcctatacttctttttttaataaatgatttcttccaatataataaattagcattccaattaagaaaactaaaatcgtaatagaaaaattcatatcaattctatagacagatgaacctaaaacattatcataagcataacttaaaggtgataactctaggtaataagaccatataaacaatctacgaataccttgataaaacaaacctgatgtcaaacctataaaactaccaatcatgccaaatgtaattgcaatcatttgatttggaattacagttgcaatccataggtgtagtgcaatgatagcaatacttacaagaattgttcctaatgtgtattttaaaagtaaagatacagaaattgactcaataacccctctaaaatgtccaaacaacacaatagataacacttgcatcaatacaggtatagataccaaaatagcagaacataaaaatttagataaataaatagtatttaaagatgtcacagaagattttaaaagcttccatgtatctcctttatgttctatatcgcttatacgtgatgtaattattgatattaagataggaaagaatagaccatttaaacttgcaaaactcataagcatataggaatattcaaatccacctaacatatctggattacgtgtaatagccctatttgaatttacgatacaccacattatttcaacagctacaaataaaaaggtcatcagaataatcttctttcttttaagtttataaaattctagaccaaggtatttcattataaagtcaccgccttaccagtaattctaagaatatatcttccaagctttttttatgttcttctattctaaatacatctatatttgaatggacaagcataccatttattttagcgacatctgagtcttttaaattttcaatagtcaagtacccatcttgtataagtgacatatatcctttagtatttaatagtttttgtgcagatacaacattcttagttttgatagcaatctgactttgacctctattatgaagttcttttatgctatcttgaaaaaccagttcgccatgatttattattcctattgatgtggcaatttggtcaatttcacttaaaagatggctagagattagaacagtcatcccgtatttttctggtagagattttattaattctctaatttcctcaatccctgctgggtcgagtccatttgtaggttcatcaagtattaataatttgggaaacttcattattgccatagcaatgccaagacgttgcttcatacctaaagaatattgactaacttttttatttttttgattttctaaccttacaatttttaatgcttcatttacattttttttaggtaaatctaagagtctttgcattatggtcatgttttcaagccctgtaagatgaccatagtatgatggagattctatcaaagaacctatatcttttaaaattgatattctatttttttcatttaactctttacctaaaatattaatatttccttgtgtgggtttagcaagtccaagaagcattttaagagtggtagattttccagctccattaggacccaaaaaaccatatacagctccttgtggaactcttaggtctatatcctttactctaaatattttattgtattcctttgaaagtctttgtgttctaattatcatttccatatgtttcatccccttttttaatctgtgcttattgattcttttaacttatatcagtataataacttggttacatttcaattagctgaaatttaccttacaataaccttaaaagtctatttaggcaaagttgtgaaaatgggtatatggtatac

SEQ ID NO: 28 - protein, 193 aa, Clostridium difficile
WIGGEVSDIALEYIKQWADINAEYNIKLWYDSEAFLVNTLKKAIVESSTTEALQLLEEEIQNPQFDNMKFYKKRMEFIYDRQKRFINYYKSQINKPTVPTIDDIIKSHLVSEYNRDETVLESYRTNSLRKINSNHGIDIRANSLFTEQELLNIYSQELLNRGNLAAASDIVRLLALKNFGGVYLDVDMLPGIH

SEQ ID NO: 29 - protein, 542 aa, Clostridium difficile
MSLISKEELIKLAYSIRPRENEYKTILTNLDEYNKLTTNNNENKYLQLKKLNESIDVFMNKYKTSSRNRALSNLKKDILKEVILIKNSNTSPVEKNLHFVWIGGEVSDIALEYIKQWADINAEYNIKLWYDSEAFLVNTLKKAIVESSTTEALQLLEEEIQNPQFDNMKFYKKRMEFIYDRQKRFINYYKSQINKPTVPTIDDIIKSHLVSEYNRDETVLESYRTNSLRKINSNHGIDIRANSLFTEQELLNIYSQELLNRGNLAAASDIVRLLALKNFGGVYLDVDMLPGIHSDLFKTISRPSSIGLDRWEMIKLEAIMKYKKYINNYTSENFDKLDQQLKDNFKLIIESKSEKSEIFSKLENLNVSDLEIKIAFALGSVINQALISKQGSYLTNLVIEQVKNRYQFLNQHLNPAIESDNNFTDTTKIFHDSLFNSATAENSMFLTKIAPYLQVGFMPEARSTISLSGPGAYASAYYDFINLQENTIEKTLKASDLIEFKFPENNLSQLTEQEINSLWSFDQASAKYQFEKYVRDYTGGSL

SEQ ID NO: 30 - protein, 193 aa, Clostridium difficile
VWIGGQINDTAINYINQWKDVNSDYNVNVFYDSNAFLINTLKKTVVESAINDTLESFRENLNDPRFDYNKFFRKRMEIIYDKQKNFINYYKAQREENPELIIDDIVKTYLSNEYSKEIDELNTYIEESLNKITQNSGNDVRNFEEFKNGESFNLYEQELVERWNLAAASDILRISALKEIGGMYLDVDMLPGI

SEQ ID NO: 31 - protein, 543 aa, Clostridium difficile
MSLVNRKQLEKMANVRFRTQEDEYVAILDALEEYHNMSENTVVEKYLKLKDINSLTDIYIDTYKKSGRNKALKKFKEYLVTEVLELKNNNLTPVEKNLHFVWIGGQINDTAINYINQWKDVNSDYNVNVFYDSNAFLINTLKKTVVESAINDTLESFRENLNDPRFDYNKFFRKRMEIIYDKQKNFINYYKAQREENPELIIDDIVKTYLSNEYSKEIDELNTYIEESLNKITQNSGNDVRNFEEFKNGESFNLYEQELVERWNLAAASDILRISALKEIGGMYLDVDMLPGIQPDLFESIEKPSSVTVDFWEMTKLEAIMKYKEYIPEYTSEHFDMLDEEVQSSFESVLASKSDKSEIFSSLGDMEASPLEVKIAFNSKGIINQGLISVKDSYCSNLIVKQIENRYKILNNSLNPAISEDNDFNTTTNTFIDSIMAEANADNGRFMMELGKYLRVGFFPDVKTTINLSGPEAYAAAYQDLLMFKEGSMNIHLIEADLRNFEISKTNISQSTEQEMASLWSFDDARAKAQFEEYKRNYFEGSL

SEQ ID NO: 32 - protein, 267 aa, Clostridium difficile
SEDNGVDFNKNTALDKNYLLNNKIPSNNVEEAGSKNYVHYIIQLQGDDISYEATCNLFSKNPKNSIIIQRNMNESAKSYFLSDDGESILELNKYRIPERLKNKEKVKVTFIGHGKDEFNTSEFARLSVDSLSNEISSFLDTIKLDISPKNVEVNLLGCNMFSYDFNVEETYPGKLLLSIMDKITSTLPDVNKNSITIGANQYEVRINSEGRKELLAHSGKWINKEEAIMSDLSSKEYIFFDSIDNKLKAKSKNIPGLASISEDIKTL

SEQ ID NO: 33 - protein, 224 aa, Clostridium difficile
GEDDNLDFSQNIVVDKEYLLEKISSLARSSERGYIHYIVQLQGDKISYEAACNLFAKTPYDSVLFQKNIEDSEIAYYYNPGDGEIQEIDKYKIPSIISDRPKIKLTFIGHGKDEFNTDIFAGFDVDSLSTEIEAAIDLAKEDISPKSIEINLLGCNMFSYSINVEETYPGKLLLKVKDKISELMPSISQDSIIVSANQYEVRINSEGRRELLDHSGEWINKEES

SEQ ID NO: 34 - protein, 2710 aa, Artificial
  Synthetic amino acid sequence: mutant C. difficile TcdA
  MISC_FEATURE (101)..(101): Xaa is any amino acid
  MISC_FEATURE (269)..(269): Xaa is any amino acid
  MISC_FEATURE (272)..(272): Xaa is any amino acid
  MISC_FEATURE (285)..(285): Xaa is any amino acid
  MISC_FEATURE (287)..(287): Xaa is any amino acid
  MISC_FEATURE (460)..(460): Xaa is any amino acid
  MISC_FEATURE (462)..(462): Xaa is any amino acid
  MISC_FEATURE (541)..(541): Xaa is any amino acid
  MISC_FEATURE (542)..(542): Xaa is any amino acid
  MISC_FEATURE (543)..(543): Xaa is any amino acid
  MISC_FEATURE (589)..(589): Xaa is any amino acid.
  MISC_FEATURE (655)..(655): Xaa is any amino acid.
  MISC_FEATURE (700)..(700): Xaa is any amino acid.
MSLISKEELIKLAYSIRPRENEYKTILTNLDEYNKLTTNNNENKYLQLKKLNESIDVFMNKYKTSSRNRALSNLKKDILKEVILIKNSNTSPVEKNLHFVXIGGEVSDIALEYIKQWADINAEYNIKLWYDSEAFLVNTLKKAIVESSTTEALQLLEEEIQNPQFDNMKFYKKRMEFIYDRQKRFINYYKSQINKPTVPTIDDIIKSHLVSEYNRDETVLESYRTNSLRKINSNHGIDIRANSLFTEQELLNIYSQELLNRGNLAAASXIVXLLALKNFGGVYLXVXMLPGIHSDLFKTISRPSSIGLDRWEMIKLEAIMKYKKYINNYTSENFDKLDQQLKDNFKLIIESKSEKSEIFSKLENLNVSDLEIKIAFALGSVINQALISKQGSYLTNLVIEQVKNRYQFLNQHLNPAIESDNNFTDTTKIFHDSLFNSATAENSMFLTKIAPYLQVGFMPXAXSTISLSGPGAYASAYYDFINLQENTIEKTLKASDLIEFKFPENNLSQLTEQEINSLWSFDQASAKYQFEKYVRDYTGGXXXEDNGVDFNKNTALDKNYLLNNKIPSNNVEEAGSKNYVHYIIQLQGXDISYEATCNLFSKNPKNSIIIQRNMNESAKSYFLSDDGESILELNKYRIPERLKNKEKVKVTFIGXGKDEFNTSEFARLSVDSLSNEISSFLDTIKLDISPKNVEVNLLGXNMFSYDFNVEETYPGKLLLSIMDKITSTLPDVNKNSITIGANQYEVRINSEGRKELLAHSGKWINKEEAIMSDLSSKEYIFFDSIDNKLKAKSKNIPGLASISEDIKTLLLDASVSPDTKFILNNLKLNIESSIGDYIYYEKLEPVKNIIHNSIDDLIDEFNLLENVSDELYELKKLNNLDEKYLISFEDISKNNSTYSVRFINKSNGESVYVETEKEIFSKYSEHITKEISTIKNSIITDVNGNLLDNIQLDHTSQVNTLNAAFFIQSLIDYSSNKDVLNDLSTSVKVQLYAQLFSTGLNTIYDSIQLVNLISNAVNDTINVLPTITEGIPIVSTILDGINLGAAIKELLDEHDPLLKKELEAKVGVLAINMSLSIAATVASIVGIGAEVTIFLLPIAGISAGIPSLVNNELILHDKATSVVNYFNHLSESKKYGPLKTEDDKILVPIDDLVISEIDFNNNSIKLGTCNILAMEGGSGHTVTGNIDHFFSSPSISSHIPSLSIYSAIGIETENLDFSKKIMMLPNAPSRVFWWETGAVPGLRSLENDGTRLLDSIRDLYPGKFYWRFYAFFDYAITTLKPVYEDTNIKIKLDKDTRNFIMPTITTNEIRNKLSYSFDGAGGTYSLLLSSYPISTNINLSKDDLWIFNIDNEVREISIENGTIKKGKLIKDVLSKIDINKNKLIIGNQTIDFSGDIDNKDRYIFLTCELDDKISLIIEINLVAKSYSLLLSGDKNYLISNLSNIIEKINTLGLDSKNIAYNYTDESNNKYFGAISKTSQKSIIHYKKDSKNILEFYNDSTLEFNSKDFIAEDINVFMKDDINTITGKYYVDNNTDKSIDFSISLVSKNQVKVNGLYLNESVYSSYLDFVKNSDGHHNTSNFMNLFLDNISFWKLFGFENINFVIDKYFTLVGKTNLGYVEFICDNNKNIDIYFGEWKTSSSKSTIFSGNGRNVVVEPIYNPDTGEDISTSLDFSYEPLYGIDRYINKVLIAPDLYTSLININTNYYSNEYYPEIIVLNPNTFHKKVNINLDSSSFEYKWSTEGSDFILVRYLEESNKKILQKIRIKGILSNTQSFNKMSIDFKDIKKLSLGYIMSNFKSFNSENELDRDHLGFKIIDNKTYYYDEDSKLVKGLININNSLFYFDPIEFNLVTGWQTINGKKYYFDINTGAALISYKIINGKHFYFNNDGVMQLGVFKGPDGFEYFAPANTQNNNIEGQAIVYQSKFLTLNGKKYYFDNDSKAVTGWRIINNEKYYFNPNNAIAAVGLQVIDNNKYYFNPDTAIISKGWQTVNGSRYYFDTDTAIAFNGYKTIDGKHFYFDSDCVVKIGVFSTSNGFEYFAPANTYNNNIEGQAIVYQSKFLTLNGKKYYFDNNSKAVTGWQTIDSKKYYFNTNTAEAATGWQTIDGKKYYFNTNTAEAATGWQTIDGKKYYFNTNTAIASTGYTIINGKHFYFNTDGIMQIGVFKGPNGFEYFAPANTDANNIEGQAILYQNEFLTLNGKKYYFGSDSKAVTGWRIINNKKYYFNPNNAIAAIHLCTINNDKYYFSYDGILQNGYITIERNNFYFDANNESKMVTGVFKGPNGFEYFAPANTHNNNIEGQAIVYQNKFLTLNGKKYYFDNDSKAVTGWQTIDGKKYYFNLNTAEAATGWQTIDGKKYYFNLNTAEAATGWQTIDGKKYYFNTNTFIASTGYTSINGKHFYFNTDGIMQIGVFKGPNGFEYFAPANTHNNNIEGQAILYQNKFLTLNGKKYYFGSDSKAVTGLRTIDGKKYYFNTNTAVAVTGWQTINGKKYYFNTNTSIASTGYTIISGKHFYFNTDGIMQIGVFKGPDGFEYFAPANTDANNIEGQAIRYQNRFLYLHDNIYYFGNNSKAATGWVTIDGNRYYFEPNTAMGANGYKTIDNKNFYFRNGLPQIGVFKGSNGFEYFAPANTDANNIEGQAIRYQNRFLHLLGKIYYFGNNSKAVTGWQTINGKVYYFMPDTAMAAAGGLFEIDGVIYFFGVDGVKAPGIYG

SEQ ID NO: 35 - protein, 2366 aa, Artificial
  Synthetic amino acid sequence: mutant C. difficile TcdB
  MISC_FEATURE (102)..(102): Xaa is any amino acid.
  MISC_FEATURE (270)..(270): Xaa is any amino acid.
  MISC_FEATURE (273)..(273): Xaa is any amino acid.
  MISC_FEATURE (286)..(286): Xaa is any amino acid.
  MISC_FEATURE (288)..(288): Xaa is any amino acid.
  MISC_FEATURE (384)..(384): Xaa is any amino acid.
  MISC_FEATURE (520)..(520): Xaa is any amino acid.
  MISC_FEATURE (543)..(543): Xaa is any amino acid.
  MISC_FEATURE (544)..(544): Xaa is any amino acid.
  MISC_FEATURE (587)..(587): Xaa is any amino acid.
  MISC_FEATURE (600)..(600): Xaa is any amino acid.
  MISC_FEATURE (653)..(653): Xaa is any amino acid.
  MISC_FEATURE (698)..(698): Xaa is any amino acid.
  MISC_FEATURE (751)..(751): Xaa is any amino acid.
MSLVNRKQLEKMANVRFRTQEDEYVAILDALEEYHNMSENTVVEKYLKLKDINSLTDIYIDTYKKSGRNKALKKFKEYLVTEVLELKNNNLTPVEKNLHFVXIGGQINDTAINYINQWKDVNSDYNVNVFYDSNAFLINTLKKTVVESAINDTLESFRENLNDPRFDYNKFFRKRMEIIYDKQKNFINYYKAQREENPELIIDDIVKTYLSNEYSKEIDELNTYIEESLNKITQNSGNDVRNFEEFKNGESFNLYEQELVERWNLAAASXILXISALKEIGGMYLXVXMLPGIQPDLFESIEKPSSVTVDFWEMTKLEAIMKYKEYIPEYTSEHFDMLDEEVQSSFESVLASKSDKSEIFSSLGDMEASPLEVKIAFNSKGIIXQGLISVKDSYCSNLIVKQIENRYKILNNSLNPAISEDNDFNTTTNTFIDSIMAEANADNGRFMMELGKYLRVGFFPAVATTINLSGPEAYAAAYQDLLMFKEGSMNIHLIEADLRNFEISKTNISQSTEQEMASLXSFDDARAKAQFEEYKRNYFEGSXXEDDNLDFSQNIVVDKEYLLEKISSLARSSERGYIHYIVQLQGXKISYEAACNLFAXTPYDSVLFQKNIEDSEIAYYYNPGDGEIQEIDKYKIPSIISDRPKIKLTFIGXGKDEFNTDIFAGFDVDSLSTEIEAAIDLAKEDISPKSIEINLLGXNMFSYSINVEETYPGKLLLKVKDKISELMPSISQDSIIVSANQYEVRINSEGXRELLDHSGEWINKEESIIKDISSKEYISFNPKENKITVKSKNLPELSTLLQEIRNNSNSSDIELEEKVMLTECEINVISNIDTQIVEERIEEAKNLTSDSINYIKDEFKLIESISDALCDLKQQNELEDSHFISFEDISETDEGFSIRFINKETGESIFVETEKTIFSEYANHITEEISKIKGTIFDTVNGKLVKKVNLDTTHEVNTLNAAFFIQSLIEYNSSKESLSNLSVAMKVQVYAQLFSTGLNTITDAAKVVELVSTALDETIDLLPTLSEGLPIIATIIDGVSLGAAIKELSETSDPLLRQEIEAKIGIMAVNLTTATTAIITSSLGIASGFSILLVPLAGISAGIPSLVNNELVLRDKATKVVDYFKHVSLVETEGVFTLLDDKIMMPQDDLVISEIDFNNNSIVLGKCEIWRMEGGSGHTVTDDIDHFFSAPSITYREPHLSIYDVLEVQKEELDLSKDLMVLPNAPNRVFAWETGWTPGLRSLENDGTKLLDRIRDNYEGEFYWRYFAFIADALITTLKPRYEDTNIRINLDSNTRSFIVPIITTEYIREKLSYSFYGSGGTYALSLSQYNMGINIELSESDVWIIDVDNVVRDVTIESDKIKKGDLIEGILSTLSIEENKIILNSHEINFSGEVNGSNGFVSLTFSILEGINAIIEVDLLSKSYKLLISGELKILMLNSNHIQQKIDYIGFNSELQKNIPYSFVDSEGKENGFINGSTKEGLFVSELPDVVLISKVYMDDSKPSFGYYSNNLKDVKVITKDNVNILTGYYLKDDIKISLSLTLQDEKTIKLNSVHLDESGVAEILKFMNRKGNTNTSDSLMSFLESMNIKSIFVNFLQSNIKFILDANFIISGTTSIGQFEFICDENDNIQPYFIKFNTLETNYTLYVGNRQNMIVEPNYDLDDSGDISSTVINFSQKYLYGIDSCVNKVVISPNIYTDEINITPVYETNNTYPEVIVLDANYINEKINVNINDLSIRYVWSNDGNDFILMSTSEENKVSQVKIRFVNVFKDKTLANKLSFNFSDKQDVPVSEIILSFTPSYYEDGLIGYDLGLVSLYNEKFYINNFGMMVSGLIYINDSLYYFKPPVNNLITGFVTVGDDKYYFNPINGGAASIGETIIDDKNYYFNQSGVLQTGVFSTEDGFKYFAPANTLDENLEGEAIDFTGKLIIDENIYYFDDNYRGAVEWKELDGEMHYFSPETGKAFKGLNQIGDYKYYFNSDGVMQKGFVSINDNKHYFDDSGVMKVGYTEIDGKHFYFAENGEMQIGVFNTEDGFKYFAHHNEDLGNEEGEEISYSGILNFNNKIYYFDDSFTAVVGWKDLEDGSKYYFDEDTAEAYIGLSLINDGQYYFNDDGIMQVGFVTINDKVFYFSDSGIIESGVQNIDDNYFYIDDNGIVQIGVFDTSDGYKYFAPANTVNDNIYGQAVEYSGLVRVGEDVYYFGETYTIETGWIYDMENESDKYYFNPETKKACKGINLIDDIKYYFDEKGIMRTGLISFENNNYYFNENGEMQFGYINIEDKMFYFGEDGVMQIGVFNTPDGFKYFAHQNTLDENFEGESINYTGWLDLDEKRYYFTDEYIAATGSVIIDGEEYYFDPDTAQLVISE

SEQ ID NO: 36 - protein, 146 aa, Artificial
  Synthetic amino acid sequence: variable light chain of A3-25 mAb IgE
MKLPVRLLVLMFWIPGSSSDVVMTHTPLSLPVSLGDQASMSCRSSQSLIHSNGNTYLHWYLQKPGQSPKLLISKVSNRFSGVPDRFSGSGSGTDFTLKISRVEAEDLGVYFCSQTTYFPYTFGGGTRLEIKRADAAPTVSIFPPSS

SEQ ID NO: 37 - protein, 189 aa, Artificial
  Synthetic amino acid sequence: variable heavy chain of A3-25 mAb IgE
MYLGLNCVFIVFLLKGVQSEVNLEESGGGLVQPGGSMKLSCVASGFTFTNYWMNWVRQSPEKGLEWIAEIRLKSHNYATHFAESVKGRFTISRDDSKSAVSLQMTNLTPEDTGIFYCTWDYYGNPAFVYWGQGTLVTVSAASIRNPQLYPLKPCKGTASMTLGCLVKDYFPGPVTVTWYSDSLNMSTVN

SEQ ID NO: 38 - protein, 16 aa, Artificial
  Synthetic amino acid sequence: CDR1 of the variable light chain of A3-25 mAb
RSSQSLIHSNGNTYLH

SEQ ID NO: 39 - protein, 7 aa, Artificial
  Synthetic amino acid sequence: CDR2 of the variable light chain of A3-25 mAb
KVSNRFS

SEQ ID NO: 40 - protein, 9 aa, Artificial
  Synthetic amino acid sequence: CDR3 of the variable light chain of A3-25 mAb
SQTTYFPYT

SEQ ID NO: 41 - protein, 10 aa, Artificial
  Synthetic amino acid sequence: CDR1 of the variable heavy chain of A3-25 mAb
GFTFTNYWMN

SEQ ID NO: 42 - protein, 19 aa, Artificial
  Synthetic amino acid sequence: CDR2 of the variable heavy chain of A3-25 mAb
EIRLKSHNYATHFAESVKG

SEQ ID NO: 43 - protein, 10 aa, Artificial
  Synthetic amino acid sequence: CDR3 of the variable heavy chain of A3-25 mAb
DYYGNPAFVY

SEQ ID NO: 44 - DNA, 8142 bp, Artificial
  Synthetic nucleotide sequence: TcdA gene (D285A D287A mutations)
catatgtctttaatatctaaagaagagttaataaaactcgcatatagcattagaccaagagaaaatgagtataaaactatactaactaatttagacgaatataataagttaactacaaacaataatgaaaataaatatttacaattaaaaaaactaaatgaatcaattgatgtttttatgaataaatataaaacttcaagcagaaatagagcactctctaatctaaaaaaagatatattaaaagaagtaattcttattaaaaattccaatacaagccctgtagaaaaaaatttacattttgtatggataggtggagaagtcagtgatattgctcttgaatacataaaacaatgggctgatattaatgcagaatataatattaaactgtggtatgatagtgaagcattcttagtaaatacactaaaaaaggctatagttgaatcttctaccactgaagcattacagctactagaggaagagattcaaaatcctcaatttgataatatgaaattttacaaaaaaaggatggaatttatatatgatagacaaaaaaggtttataaattattataaatctcaaatcaataaacctacagtacctacaatagatgatattataaagtctcatctagtatctgaatataatagagatgaaactgtattagaatcatatagaacaaattctttgagaaaaataaatagtaatcatgggatagatatcagggctaatagtttgtttacagaacaagagttattaaatatttatagtcaggagttgttaaatcgtggaaatttagctgcagcatctgacatagtaagattattagccctaaaaaattttggcggagtatatttagcagttgcaatgcttccaggtattcactctgatttatttaaaacaatatctagacctagctctattggactagaccgttgggaaatgataaaattagaggctattatgaagtataaaaaatatataaataattatacatcagaaaactttgataaacttgatcaacaattaaaagataattttaaactcattatagaaagtaaaagtgaaaaatctgagatattttctaaattagaaaatttaaatgtatctgatcttgaaattaaaatagctttcgctttaggcagtgttataaatcaagccttgatatcaaaacaaggttcatatcttactaacctagtaatagaacaagtaaaaaatagatatcaatttttaaaccaacaccttaacccagccatagagtctgataataacttcacagatactactaaaatttttcatgattcattatttaattcagctaccgcagaaaactctatgtttttaacaaaaatagcaccatacttacaagtaggttttatgccagaagctcgctccacaataagtttaagtggtccaggagcttatgcgtcagcttactatgatttcataaatttacaagaaaatactatagaaaaaactttaaaagcatcagatttaatagaatttaaattcccagaaaataatctatctcaattgacagaacaagaaataaatagtctatggagctttgatcaagcaagtgcaaaatatcaatttgagaaatatgtaagagattatactggtggatctctttctgaagacaatggggtagactttaataaaaatactgccctcgacaaaaactatttattaaataataaaattccatcaaacaatgtagaagaagctggaagtaaaaattatgttcattatatcatacagttacaaggagatgatataagttatgaagcaacatgcaatttattttctaaaaatcctaaaaatagtattattatacaacgaaatatgaatgaaagtgcaaaaagctactttttaagtgatgatggagaatctattttagaattaaataaatataggatacctgaaagattaaaaaataaggaaaaagtaaaagtaacctttattggacatggtaaagatgaattcaacacaagcgaatttgctagattaagtgtagattcactttccaatgagataagttcatttttagataccataaaattagatatatcacctaaaaatgtagaagtaaacttacttggatgtaatatgtttagttatgattttaatgttgaagaaacttatcctgggaagttgctattaagtattatggacaaaattacttccactttacctgatgtaaataaaaattctattactataggagcaaatcaatatgaagtaagaattaatagtgagggaagaaaagaacttctggctcactcaggtaaatggataaataaagaagaagctattatgagcgatttatctagtaaagaatacattttttttgattctatagataataagctaaaagcaaagtccaagaatattccaggattagcatcaatatcagaagatataaaaacattattacttgatgcaagtgttagtcctgatacaaaatttattttaaataatcttaagcttaatattgaatcttctattggtgattacatttattatgaaaaattagagcctgttaaaaatataattcacaattctatagatgatttaatagatgagttcaatctacttgaaaatgtatctgatgaattatatgaattaaaaaaattaaataatctagatgagaagtatttaatatcttttgaagatatctcaaaaaataattcaacttactctgtaagatttattaacaaaagtaatggtgagtcagtttatgtagaaacagaaaaagaaattttttcaaaatatagcgaacatattacaaaagaaataagtactataaagaatagtataattacagatgttaatggtaatttattggataatatacagttagatcatacttctcaagttaatacattaaacgcagcattctttattcaatcattaatagattatagtagcaataaagatgtactgaatgatttaagtacctcagttaaggttcaactttatgctcaactatttagtacaggtttaaatactatatatgactctatccaattagtaaatttaatatcaaatgcagtaaatgatactataaatgtactacctacaataacagaggggatacctattgtatctactatattagacggaataaacttaggtgcagcaattaaggaattactagacgaacatgacccattactaaaaaaagaattagaagctaaggtgggtgttttagcaataaatatgtcattatctatagctgcaactgtagcttcaattgttggaataggtgctgaagttactattttcttattacctatagctggtatatctgcaggaataccttcattagttaataatgaattaatattgcatgataaggcaacttcagtggtaaactattttaatcatttgtctgaatctaaaaaatatggccctcttaaaacagaagatgataaaattttagttcctattgatgatttagtaatatcagaaatagattttaataataattcgataaaactaggaacatgtaatatattagcaatggaggggggatcaggacacacagtgactggtaatatagatcactttttctcatctccatctataagttctcatattccttcattatcaatttattctgcaataggtatagaaacagaaaatctagatttttcaaaaaaaataatgatgttacctaatgctccttcaagagtgttttggtgggaaactggagcagttccaggtttaagatcattggaaaatgacggaactagattacttgattcaataagagatttatacccaggtaaattttactggagattctatgcttttttcgattatgcaataactacattaaaaccagtttatgaagacactaatattaaaattaaactagataaagatactagaaacttcataatgccaactataactactaacgaaattagaaacaaattatcttattcatttgatggagcaggaggaacttactctttattattatcttcatatccaatatcaacgaatataaatttatctaaagatgatttatggatatttaatattgataatgaagtaagagaaatatctatagaaaatggtactattaaaaaaggaaagttaataaaagatgttttaagtaaaattgatataaataaaaataaacttattataggcaatcaaacaatagatttttcaggcgatatagataataaagatagatatatattcttgacttgtgagttagatgataaaattagtttaataatagaaataaatcttgttgcaaaatcttatagtttgttattgtctggggataaaaattatttgatatccaatttatctaatattattgagaaaatcaatactttaggactagatagtaaaaatatagcgtacaattacactgatgaatctaataataaatattttggagctatatctaaaacaagtcaaaaaagcataatacattataaaaaagacagtaaaaatatattagaattttataatgacagtacattagaatttaacagtaaagattttattgctgaagatataaatgtatttatgaaagatgatattaatactataacaggaaaatactatgttgataataatactgataaaagtatagatttctctatttctttagttagtaaaaatcaagtaaaagtaaatggattatatttaaatgaatccgtatactcatcttaccttgattttgtgaaaaattcagatggacaccataatacttctaattttatgaatttatttttggacaatataagtttctggaaattgtttgggtttgaaaatataaattttgtaatcgataaatactttacccttgttggtaaaactaatcttggatatgtagaatttatttgtgacaataataaaaatatagatatatattttggtgaatggaaaacatcgtcatctaaaagcactatatttagcggaaatggtagaaatgttgtagtagagcctatatataatcctgatacgggtgaagatatatctacttcactagatttttcctatgaacctctctatggaatagatagatatatcaataaagtattgatagcacctgatttatatacaagtttaataaatattaataccaattattattcaaatgagtactaccctgagattatagttcttaacccaaatacattccacaaaaaagtaaatataaatttagatagttcttcttttgagtataaatggtctacagaaggaagtgactttattttagttagatacttagaagaaagtaataaaaaaatattacaaaaaataagaatcaaaggtatcttatctaatactcaatcatttaataaaatgagtatagattttaaagatattaaaaaactatcattaggatatataatgagtaattttaaatcatttaattctgaaaatgaattagatagagatcatttaggatttaaaataatagataataaaacttattactatgatgaagatagtaaattagttaaaggattaatcaatataaataattcattattctattttgatcctatagaatttaacttagtaactggatggcaaactatcaatggtaaaaaatattattttgatataaatactggagcagctttaattagttataaaattattaatggtaaacacttttattttaataatgatggtgtgatgcagttgggagtatttaaaggacctgatggatttgaatattttgcacctgccaatactcaaaataataacatagaaggtcaggctatagtttatcaaagtaaattcttaactttgaatggcaaaaaatattattttgataatgactcaaaagcagtcactggatggagaattattaacaatgagaaatattactttaatcctaataatgctattgctgcagtcggattgcaagtaattgacaataataagtattatttcaatcctgacactgctatcatctcaaaaggttggcagactgttaatggtagtagatactactttgatactgataccgctattgcctttaatggttataaaactattgatggtaaacacttttattttgatagtgattgtgtagtgaaaataggtgtgtttagtacctctaatggatttgaatattttgcacctgctaatacttataataataacatagaaggtcaggctatagtttatcaaagtaaattcttaactttgaatggtaaaaaatattactttgataataactcaaaagcagttaccggatggcaaactattgatagtaaaaaatattactttaatactaacactgctgaagcagctactggatggcaaactattgatggtaaaaaatattactttaatactaacactgctgaagcagctactggatggcaaactattgatggtaaaaaatattactttaatactaacactgctatagcttcaactggttatacaattattaatggtaaacatttttattttaatactgatggtattatgcagataggagtgtttaaaggacctaatggatttgaatattttgcacctgctaatacggatgctaacaacatagaaggtcaagctatactttaccaaaatgaattcttaactttgaatggtaaaaaatattactttggtagtgactcaaaagcagttactggatggagaattattaacaataagaaatattactttaatcctaataatgctattgctgcaattcatctatgcactataaataatgacaagtattactttagttatgatggaattcttcaaaatggatatattactattgaaagaaataatttctattttgatgctaataatgaatctaaaatggtaacaggagtatttaaaggacctaatggatttgagtattttgcacctgctaatactcacaataataacatagaaggtcaggctatagtttaccagaacaaattcttaactttgaatggcaaaaaatattattttgataatgactcaaaagcagttactggatggcaaaccattgatggtaaaaaatattactttaatcttaacactgctgaagcagctactggatggcaaactattgatggtaaaaaatattactttaatcttaacactgctgaagcagctactggatggcaaactattgatggtaaaaaatattactttaatactaacactttcatagcctcaactggttatacaagtattaatggtaaacatttttattttaatactgatggtattatgcagataggagtgtttaaaggacctaatggatttgaatactttgcacctgctaatactcataataataacatagaaggtcaagctatactttaccaaaataaattcttaactttgaatggtaaaaaatattactttggtagtgactcaaaagcagttaccggattgcgaactattgatggtaaaaaatattactttaatactaacactgctgttgcagttactggatggcaaactattaatggtaaaaaatactactttaatactaacacttctatagcttcaactggttatacaattattagtggtaaacatttttattttaatactgatggtattatgcagataggagtgtttaaaggacctgatggatttgaatactttgcacctgctaatacagatgctaacaatatagaaggtcaagctatacgttatcaaaatagattcctatatttacatgacaatatatattattttggtaataattcaaaagcagctactggttgggtaactattgatggtaatagatattacttcgagcctaatacagctatgggtgcgaatggttataaaactattgataataaaaatttttactttagaaatggtttacctcagataggagtgtttaaagggtctaatggatttgaatactttgcacctgctaatacggatgctaacaatatagaaggtcaagctatacgttatcaaaatagattcctacatttacttggaaaaatatattactttggtaataattcaaaagcagttactggatggcaaactattaatggtaaagtatattactttatgcctgatactgctatggctgcagcaggtggacttttcgagattgatggtgttatatatttctttggtgttgatggagtaaaagcccctgggatatatggctaaagatct

SEQ ID NO: 45 - DNA, 8136 bp, Artificial
  Synthetic nucleotide sequence: TcdA gene (D285A D287A  C700A mutations)
catatgtctttaatatctaaagaagagttaataaaactcgcatatagcattagaccaagagaaaatgagtataaaactatactaactaatttagacgaatataataagttaactacaaacaataatgaaaataaatatttacaattaaaaaaactaaatgaatcaattgatgtttttatgaataaatataaaacttcaagcagaaatagagcactctctaatctaaaaaaagatatattaaaagaagtaattcttattaaaaattccaatacaagccctgtagaaaaaaatttacattttgtatggataggtggagaagtcagtgatattgctcttgaatacataaaacaatgggctgatattaatgcagaatataatattaaactgtggtatgatagtgaagcattcttagtaaatacactaaaaaaggctatagttgaatcttctaccactgaagcattacagctactagaggaagagattcaaaatcctcaatttgataatatgaaattttacaaaaaaaggatggaatttatatatgatagacaaaaaaggtttataaattattataaatctcaaatcaataaacctacagtacctacaatagatgatattataaagtctcatctagtatctgaatataatagagatgaaactgtattagaatcatatagaacaaattctttgagaaaaataaatagtaatcatgggatagatatcagggctaatagtttgtttacagaacaagagttattaaatatttatagtcaggagttgttaaatcgtggaaatttagctgcagcatctgacatagtaagattattagccctaaaaaattttggcggagtatatttagcagttgcaatgcttccaggtattcactctgatttatttaaaacaatatctagacctagctctattggactagaccgttgggaaatgataaaattagaggctattatgaagtataaaaaatatataaataattatacatcagaaaactttgataaacttgatcaacaattaaaagataattttaaactcattatagaaagtaaaagtgaaaaatctgagatattttctaaattagaaaatttaaatgtatctgatcttgaaattaaaatagctttcgctttaggcagtgttataaatcaagccttgatatcaaaacaaggttcatatcttactaacctagtaatagaacaagtaaaaaatagatatcaatttttaaaccaacaccttaacccagccatagagtctgataataacttcacagatactactaaaatttttcatgattcattatttaattcagctaccgcagaaaactctatgtttttaacaaaaatagcaccatacttacaagtaggttttatgccagaagctcgctccacaataagtttaagtggtccaggagcttatgcgtcagcttactatgatttcataaatttacaagaaaatactatagaaaaaactttaaaagcatcagatttaatagaatttaaattcccagaaaataatctatctcaattgacagaacaagaaataaatagtctatggagctttgatcaagcaagtgcaaaatatcaatttgagaaatatgtaagagattatactggtggatctctttctgaagacaatggggtagactttaataaaaatactgccctcgacaaaaactatttattaaataataaaattccatcaaacaatgtagaagaagctggaagtaaaaattatgttcattatatcatacagttacaaggagatgatataagttatgaagcaacatgcaatttattttctaaaaatcctaaaaatagtattattatacaacgaaatatgaatgaaagtgcaaaaagctactttttaagtgatgatggagaatctattttagaattaaataaatataggatacctgaaagattaaaaaataaggaaaaagtaaaagtaacctttattggacatggtaaagatgaattcaacacaagcgaatttgctagattaagtgtagattcactttccaatgagataagttcatttttagataccataaaattagatatatcacctaaaaatgtagaagtaaacttacttggagctaatatgtttagttatgattttaatgttgaagaaacttatcctgggaagttgctattaagtattatggacaaaattacttccactttacctgatgtaaataaaaattctattactataggagcaaatcaatatgaagtaagaattaatagtgagggaagaaaagaacttctggctcactcaggtaaatggataaataaagaagaagctattatgagcgatttatctagtaaagaatacattttttttgattctatagataataagctaaaagcaaagtccaagaatattccaggattagcatcaatatcagaagatataaaaacattattacttgatgcaagtgttagtcctgatacaaaatttattttaaataatcttaagcttaatattgaatcttctattggtgattacatttattatgaaaaattagagcctgttaaaaatataattcacaattctatagatgatttaatagatgagttcaatctacttgaaaatgtatctgatgaattatatgaattaaaaaaattaaataatctagatgagaagtatttaatatcttttgaagatatctcaaaaaataattcaacttactctgtaagatttattaacaaaagtaatggtgagtcagtttatgtagaaacagaaaaagaaattttttcaaaatatagcgaacatattacaaaagaaataagtactataaagaatagtataattacagatgttaatggtaatttattggataatatacagttagatcatacttctcaagttaatacattaaacgcagcattctttattcaatcattaatagattatagtagcaataaagatgtactgaatgatttaagtacctcagttaaggttcaactttatgctcaactatttagtacaggtttaaatactatatatgactctatccaattagtaaatttaatatcaaatgcagtaaatgatactataaatgtactacctacaataacagaggggatacctattgtatctactatattagacggaataaacttaggtgcagcaattaaggaattactagacgaacatgacccattactaaaaaaagaattagaagctaaggtgggtgttttagcaataaatatgtcattatctatagctgcaactgtagcttcaattgttggaataggtgctgaagttactattttcttattacctatagctggtatatctgcaggaataccttcattagttaataatgaattaatattgcatgataaggcaacttcagtggtaaactattttaatcatttgtctgaatctaaaaaatatggccctcttaaaacagaagatgataaaattttagttcctattgatgatttagtaatatcagaaatagattttaataataattcgataaaactaggaacatgtaatatattagcaatggaggggggatcaggacacacagtgactggtaatatagatcactttttctcatctccatctataagttctcatattccttcattatcaatttattctgcaataggtatagaaacagaaaatctagatttttcaaaaaaaataatgatgttacctaatgctccttcaagagtgttttggtgggaaactggagcagttccaggtttaagatcattggaaaatgacggaactagattacttgattcaataagagatttatacccaggtaaattttactggagattctatgcttttttcgattatgcaataactacattaaaaccagtttatgaagacactaatattaaaattaaactagataaagatactagaaacttcataatgccaactataactactaacgaaattagaaacaaattatcttattcatttgatggagcaggaggaacttactctttattattatcttcatatccaatatcaacgaatataaatttatctaaagatgatttatggatatttaatattgataatgaagtaagagaaatatctatagaaaatggtactattaaaaaaggaaagttaataaaagatgttttaagtaaaattgatataaataaaaataaacttattataggcaatcaaacaatagatttttcaggcgatatagataataaagatagatatatattcttgacttgtgagttagatgataaaattagtttaataatagaaataaatcttgttgcaaaatcttatagtttgttattgtctggggataaaaattatttgatatccaatttatctaatattattgagaaaatcaatactttaggactagatagtaaaaatatagcgtacaattacactgatgaatctaataataaatattttggagctatatctaaaacaagtcaaaaaagcataatacattataaaaaagacagtaaaaatatattagaattttataatgacagtacattagaatttaacagtaaagattttattgctgaagatataaatgtatttatgaaagatgatattaatactataacaggaaaatactatgttgataataatactgataaaagtatagatttctctatttctttagttagtaaaaatcaagtaaaagtaaatggattatatttaaatgaatccgtatactcatcttaccttgattttgtgaaaaattcagatggacaccataatacttctaattttatgaatttatttttggacaatataagtttctggaaattgtttgggtttgaaaatataaattttgtaatcgataaatactttacccttgttggtaaaactaatcttggatatgtagaatttatttgtgacaataataaaaatatagatatatattttggtgaatggaaaacatcgtcatctaaaagcactatatttagcggaaatggtagaaatgttgtagtagagcctatatataatcctgatacgggtgaagatatatctacttcactagatttttcctatgaacctctctatggaatagatagatatatcaataaagtattgatagcacctgatttatatacaagtttaataaatattaataccaattattattcaaatgagtactaccctgagattatagttcttaacccaaatacattccacaaaaaagtaaatataaatttagatagttcttcttttgagtataaatggtctacagaaggaagtgactttattttagttagatacttagaagaaagtaataaaaaaatattacaaaaaataagaatcaaaggtatcttatctaatactcaatcatttaataaaatgagtatagattttaaagatattaaaaaactatcattaggatatataatgagtaattttaaatcatttaattctgaaaatgaattagatagagatcatttaggatttaaaataatagataataaaacttattactatgatgaagatagtaaattagttaaaggattaatcaatataaataattcattattctattttgatcctatagaatttaacttagtaactggatggcaaactatcaatggtaaaaaatattattttgatataaatactggagcagctttaattagttataaaattattaatggtaaacacttttattttaataatgatggtgtgatgcagttgggagtatttaaaggacctgatggatttgaatattttgcacctgccaatactcaaaataataacatagaaggtcaggctatagtttatcaaagtaaattcttaactttgaatggcaaaaaatattattttgataatgactcaaaagcagtcactggatggagaattattaacaatgagaaatattactttaatcctaataatgctattgctgcagtcggattgcaagtaattgacaataataagtattatttcaatcctgacactgctatcatctcaaaaggttggcagactgttaatggtagtagatactactttgatactgataccgctattgcctttaatggttataaaactattgatggtaaacacttttattttgatagtgattgtgtagtgaaaataggtgtgtttagtacctctaatggatttgaatattttgcacctgctaatacttataataataacatagaaggtcaggctatagtttatcaaagtaaattcttaactttgaatggtaaaaaatattactttgataataactcaaaagcagttaccggatggcaaactattgatagtaaaaaatattactttaatactaacactgctgaagcagctactggatggcaaactattgatggtaaaaaatattactttaatactaacactgctgaagcagctactggatggcaaactattgatggtaaaaaatattactttaatactaacactgctatagcttcaactggttatacaattattaatggtaaacatttttattttaatactgatggtattatgcagataggagtgtttaaaggacctaatggatttgaatattttgcacctgctaatacggatgctaacaacatagaaggtcaagctatactttaccaaaatgaattcttaactttgaatggtaaaaaatattactttggtagtgactcaaaagcagttactggatggagaattattaacaataagaaatattactttaatcctaataatgctattgctgcaattcatctatgcactataaataatgacaagtattactttagttatgatggaattcttcaaaatggatatattactattgaaagaaataatttctattttgatgctaataatgaatctaaaatggtaacaggagtatttaaaggacctaatggatttgagtattttgcacctgctaatactcacaataataacatagaaggtcaggctatagtttaccagaacaaattcttaactttgaatggcaaaaaatattattttgataatgactcaaaagcagttactggatggcaaaccattgatggtaaaaaatattactttaatcttaacactgctgaagcagctactggatggcaaactattgatggtaaaaaatattactttaatcttaacactgctgaagcagctactggatggcaaactattgatggtaaaaaatattactttaatactaacactttcatagcctcaactggttatacaagtattaatggtaaacatttttattttaatactgatggtattatgcagataggagtgtttaaaggacctaatggatttgaatactttgcacctgctaatactcataataataacatagaaggtcaagctatactttaccaaaataaattcttaactttgaatggtaaaaaatattactttggtagtgactcaaaagcagttaccggattgcgaactattgatggtaaaaaatattactttaatactaacactgctgttgcagttactggatggcaaactattaatggtaaaaaatactactttaatactaacacttctatagcttcaactggttatacaattattagtggtaaacatttttattttaatactgatggtattatgcagataggagtgtttaaaggacctgatggatttgaatactttgcacctgctaatacagatgctaacaatatagaaggtcaagctatacgttatcaaaatagattcctatatttacatgacaatatatattattttggtaataattcaaaagcagctactggttgggtaactattgatggtaatagatattacttcgagcctaatacagctatgggtgcgaatggttataaaactattgataataaaaatttttactttagaaatggtttacctcagataggagtgtttaaagggtctaatggatttgaatactttgcacctgctaatacggatgctaacaatatagaaggtcaagctatacgttatcaaaatagattcctacatttacttggaaaaatatattactttggtaataattcaaaagcagttactggatggcaaactattaatggtaaagtatattactttatgcctgatactgctatggctgcagcaggtggacttttcgagattgatggtgttatatatttctttggtgttgatggagtaaaagcccctgggatatatggctaa

SEQ ID NO: 46 - DNA, 7110 bp, Artificial
  Synthetic nucleotide sequence: TcdB (D286A D288A mutations)
catatgagtttagttaatagaaaacagttagaaaaaatggcaaatgtaagatttcgtactcaagaagatgaatatgttgcaatattggatgctttagaagaatatcataatatgtcagagaatactgtagtcgaaaaatatttaaaattaaaagatataaatagtttaacagatatttatatagatacatataaaaaatctggtagaaataaagccttaaaaaaatttaaggaatatctagttacagaagtattagagctaaagaataataatttaactccagttgagaaaaatttacattttgtttggattggaggtcaaataaatgacactgctattaattatataaatcaatggaaagatgtaaatagtgattataatgttaatgttttttatgatagtaatgcatttttgataaacacattgaaaaaaactgtagtagaatcagcaataaatgatacacttgaatcatttagagaaaacttaaatgaccctagatttgactataataaattcttcagaaaacgtatggaaataatttatgataaacagaaaaatttcataaactactataaagctcaaagagaagaaaatcctgaacttataattgatgatattgtaaagacatatctttcaaatgagtattcaaaggagatagatgaacttaatacctatattgaagaatccttaaataaaattacacagaatagtggaaatgatgttagaaactttgaagaatttaaaaatggagagtcattcaacttatatgaacaagagttggtagaaaggtggaatttagctgctgcttctgacatattaagaatatctgcattaaaagaaattggtggtatgtatttagcagttgcaatgttaccaggaatacaaccagacttatttgagtctatagagaaacctagttcagtaacagtggatttttgggaaatgacaaagttagaagctataatgaaatacaaagaatatataccagaatatacctcagaacattttgacatgttagacgaagaagttcaaagtagttttgaatctgttctagcttctaagtcagataaatcagaaatattctcatcacttggtgatatggaggcatcaccactagaagttaaaattgcatttaatagtaagggtattataaatcaagggctaatttctgtgaaagactcatattgtagcaatttaatagtaaaacaaatcgagaatagatataaaatattgaataatagtttaaatccagctattagcgaggataatgattttaatactacaacgaatacctttattgatagtataatggctgaagctaatgcagataatggtagatttatgatggaactaggaaagtatttaagagttggtttcttcccagatgttaaaactactattaacttaagtggccctgaagcttatgcggcagcttatcaagatttattaatgtttaaagaaggcagtatgaatatccatttgatagaagctgatttaagaaactttgaaatctctaaaactaatatttctcaatcaactgaacaagaaatggcttctttatggtcatttgacgatgcaagagctaaagctcaatttgaagaatataaaaggaattattttgaaggttctcttggtgaagatgataatcttgatttttctcaaaatatagtagttgacaaggagtatcttttagaaaaaatatcttcattagcaagaagttcagagagaggatatatacactatattgttcagttacaaggagataaaattagttatgaagcagcatgtaacttatttgcaaagactccttatgatagtgtactgtttcagaaaaatatagaagattcagaaattgcatattattataatcctggagatggtgaaatacaagaaatagacaagtataaaattccaagtataatttctgatagacctaagattaaattaacatttattggtcatggtaaagatgaatttaatactgatatatttgcaggttttgatgtagattcattatccacagaaatagaagcagcaatagatttagctaaagaggatatttctcctaagtcaatagaaataaatttattaggatgtaatatgtttagctactctatcaacgtagaggagacttatcctggaaaattattacttaaagttaaagataaaatatcagaattaatgccatctataagtcaagactctattatagtaagtgcaaatcaatatgaagttagaataaatagtgaaggaagaagagaattattggatcattctggtgaatggataaataaagaagaaagtattataaaggatatttcatcaaaagaatatatatcatttaatcctaaagaaaataaaattacagtaaaatctaaaaatttacctgagctatctacattattacaagaaattagaaataattctaattcaagtgatattgaactagaagaaaaagtaatgttaacagaatgtgagataaatgttatttcaaatatagatacgcaaattgttgaggaaaggattgaagaagctaagaatttaacttctgactctattaattatataaaagatgaatttaaactaatagaatctatttctgatgcactatgtgacttaaaacaacagaatgaattagaagattctcattttatatcttttgaggacatatcagagactgatgagggatttagtataagatttattaataaagaaactggagaatctatatttgtagaaactgaaaaaacaatattctctgaatatgctaatcatataactgaagagatttctaagataaaaggtactatatttgatactgtaaatggtaagttagtaaaaaaagtaaatttagatactacacacgaagtaaatactttaaatgctgcattttttatacaatcattaatagaatataatagttctaaagaatctcttagtaatttaagtgtagcaatgaaagtccaagtttacgctcaattatttagtactggtttaaatactattacagatgcagccaaagttgttgaattagtatcaactgcattagatgaaactatagacttacttcctacattatctgaaggattacctataattgcaactattatagatggtgtaagtttaggtgcagcaatcaaagagctaagtgaaacgagtgacccattattaagacaagaaatagaagctaagataggtataatggcagtaaatttaacaacagctacaactgcaatcattacttcatctttggggatagctagtggatttagtatacttttagttcctttagcaggaatttcagcaggtataccaagcttagtaaacaatgaacttgtacttcgagataaggcaacaaaggttgtagattattttaaacatgtttcattagttgaaactgaaggagtatttactttattagatgataaaataatgatgccacaagatgatttagtgatatcagaaatagattttaataataattcaatagttttaggtaaatgtgaaatctggagaatggaaggtggttcaggtcatactgtaactgatgatatagatcacttcttttcagcaccatcaataacatatagagagccacacttatctatatatgacgtattggaagtacaaaaagaagaacttgatttgtcaaaagatttaatggtattacctaatgctccaaatagagtatttgcttgggaaacaggatggacaccaggtttaagaagcttagaaaatgatggcacaaaactgttagaccgtataagagataactatgaaggtgagttttattggagatattttgcttttatagctgatgctttaataacaacattaaaaccaagatatgaagatactaatataagaataaatttagatagtaatactagaagttttatagttccaataataactacagaatatataagagaaaaattatcatattctttctatggttcaggaggaacttatgcattgtctctttctcaatataatatgggtataaatatagaattaagtgaaagtgatgtttggattatagatgttgataatgttgtgagagatgtaactatagaatctgataaaattaaaaaaggtgatttaatagaaggtattttatctacactaagtattgaagagaataaaattatcttaaatagccatgagattaatttttctggtgaggtaaatggaagtaatggatttgtttctttaacattttcaattttagaaggaataaatgcaattatagaagttgatttattatctaaatcatataaattacttatttctggcgaattaaaaatattgatgttaaattcaaatcatattcaacagaaaatagattatataggattcaatagcgaattacagaaaaatataccatatagctttgtagatagtgaaggaaaagagaatggttttattaatggttcaacaaaagaaggtttatttgtatctgaattacctgatgtagttcttataagtaaggtttatatggatgatagtaagccttcatttggatattatagtaataatttgaaagatgtcaaagttataactaaagataatgttaatatattaacaggttattatcttaaggatgatataaaaatctctctttctttgactctacaagatgaaaaaactataaagttaaatagtgtgcatttagatgaaagtggagtagctgagattttgaagttcatgaatagaaaaggtaatacaaatacttcagattctttaatgagctttttagaaagtatgaatataaaaagtattttcgttaatttcttacaatctaatattaagtttatattagatgctaattttataataagtggtactacttctattggccaatttgagtttatttgtgatgaaaatgataatatacaaccatatttcattaagtttaatacactagaaactaattatactttatatgtaggaaatagacaaaatatgatagtggaaccaaattatgatttagatgattctggagatatatcttcaactgttatcaatttctctcaaaagtatctttatggaatagacagttgtgttaataaagttgtaatttcaccaaatatttatacagatgaaataaatataacgcctgtatatgaaacaaataatacttatccagaagttattgtattagatgcaaattatataaatgaaaaaataaatgttaatatcaatgatctatctatacgatatgtatggagtaatgatggtaatgattttattcttatgtcaactagtgaagaaaataaggtgtcacaagttaaaataagattcgttaatgtttttaaagataagactttggcaaataagctatcttttaactttagtgataaacaagatgtacctgtaagtgaaataatcttatcatttacaccttcatattatgaggatggattgattggctatgatttgggtctagtttctttatataatgagaaattttatattaataactttggaatgatggtatctggattaatatatattaatgattcattatattattttaaaccaccagtaaataatttgataactggatttgtgactgtaggcgatgataaatactactttaatccaattaatggtggagctgcttcaattggagagacaataattgatgacaaaaattattatttcaaccaaagtggagtgttacaaacaggtgtatttagtacagaagatggatttaaatattttgccccagctaatacacttgatgaaaacctagaaggagaagcaattgattttactggaaaattaattattgacgaaaatatttattattttgatgataattatagaggagctgtagaatggaaagaattagatggtgaaatgcactattttagcccagaaacaggtaaagcttttaaaggtctaaatcaaataggtgattataaatactatttcaattctgatggagttatgcaaaaaggatttgttagtataaatgataataaacactattttgatgattctggtgttatgaaagtaggttacactgaaatagatggcaagcatttctactttgctgaaaacggagaaatgcaaataggagtatttaatacagaagatggatttaaatattttgctcatcataatgaagatttaggaaatgaagaaggtgaagaaatctcatattctggtatattaaatttcaataataaaatttactattttgatgattcatttactgctgtagttggatggaaagatttagaggatggttcaaagtattattttgatgaagatacagcagaagcatatataggtttgtcattaataaatgatggtcaatattattttaatgatgatggaattatgcaagttggatttgtcactataaatgataaagtcttctacttctctgactctggaattatagaatctggagtacaaaacatagatgacaattatttctatatagatgataatggtatagttcaaattggtgtatttgatacttcagatggatataaatattttgcacctgctaatactgtaaatgataatatttacggacaagcagttgaatatagtggtttagttagagttggtgaagatgtatattattttggagaaacatatacaattgagactggatggatatatgatatggaaaatgaaagtgataaatattatttcaatccagaaactaaaaaagcatgcaaaggtattaatttaattgatgatataaaatattattttgatgagaagggcataatgagaacgggtcttatatcatttgaaaataataattattactttaatgagaatggtgaaatgcaatttggttatataaatatagaagataagatgttctattttggtgaagatggtgtcatgcagattggagtatttaatacaccagatggatttaaatactttgcacatcaaaatactttggatgagaattttgagggagaatcaataaactatactggttggttagatttagatgaaaagagatattattttacagatgaatatattgcagcaactggttcagttattattgatggtgaggagtattattttgatcctgatacagctcaattagtgattagtgaatagagatct

SEQ ID NO: 47 - DNA, 7104 bp, Artificial
  Synthetic nucleotide sequence: TcdB (D286A D288A C698A mutations)
catatgagtttagttaatagaaaacagttagaaaaaatggcaaatgtaagatttcgtactcaagaagatgaatatgttgcaatattggatgctttagaagaatatcataatatgtcagagaatactgtagtcgaaaaatatttaaaattaaaagatataaatagtttaacagatatttatatagatacatataaaaaatctggtagaaataaagccttaaaaaaatttaaggaatatctagttacagaagtattagagctaaagaataataatttaactccagttgagaaaaatttacattttgtttggattggaggtcaaataaatgacactgctattaattatataaatcaatggaaagatgtaaatagtgattataatgttaatgttttttatgatagtaatgcatttttgataaacacattgaaaaaaactgtagtagaatcagcaataaatgatacacttgaatcatttagagaaaacttaaatgaccctagatttgactataataaattcttcagaaaacgtatggaaataatttatgataaacagaaaaatttcataaactactataaagctcaaagagaagaaaatcctgaacttataattgatgatattgtaaagacatatctttcaaatgagtattcaaaggagatagatgaacttaatacctatattgaagaatccttaaataaaattacacagaatagtggaaatgatgttagaaactttgaagaatttaaaaatggagagtcattcaacttatatgaacaagagttggtagaaaggtggaatttagctgctgcttctgacatattaagaatatctgcattaaaagaaattggtggtatgtatttagcagttgcaatgttaccaggaatacaaccagacttatttgagtctatagagaaacctagttcagtaacagtggatttttgggaaatgacaaagttagaagctataatgaaatacaaagaatatataccagaatatacctcagaacattttgacatgttagacgaagaagttcaaagtagttttgaatctgttctagcttctaagtcagataaatcagaaatattctcatcacttggtgatatggaggcatcaccactagaagttaaaattgcatttaatagtaagggtattataaatcaagggctaatttctgtgaaagactcatattgtagcaatttaatagtaaaacaaatcgagaatagatataaaatattgaataatagtttaaatccagctattagcgaggataatgattttaatactacaacgaatacctttattgatagtataatggctgaagctaatgcagataatggtagatttatgatggaactaggaaagtatttaagagttggtttcttcccagatgttaaaactactattaacttaagtggccctgaagcttatgcggcagcttatcaagatttattaatgtttaaagaaggcagtatgaatatccatttgatagaagctgatttaagaaactttgaaatctctaaaactaatatttctcaatcaactgaacaagaaatggcttctttatggtcatttgacgatgcaagagctaaagctcaatttgaagaatataaaaggaattattttgaaggttctcttggtgaagatgataatcttgatttttctcaaaatatagtagttgacaaggagtatcttttagaaaaaatatcttcattagcaagaagttcagagagaggatatatacactatattgttcagttacaaggagataaaattagttatgaagcagcatgtaacttatttgcaaagactccttatgatagtgtactgtttcagaaaaatatagaagattcagaaattgcatattattataatcctggagatggtgaaatacaagaaatagacaagtataaaattccaagtataatttctgatagacctaagattaaattaacatttattggtcatggtaaagatgaatttaatactgatatatttgcaggttttgatgtagattcattatccacagaaatagaagcagcaatagatttagctaaagaggatatttctcctaagtcaatagaaataaatttattaggagctaatatgtttagctactctatcaacgtagaggagacttatcctggaaaattattacttaaagttaaagataaaatatcagaattaatgccatctataagtcaagactctattatagtaagtgcaaatcaatatgaagttagaataaatagtgaaggaagaagagaattattggatcattctggtgaatggataaataaagaagaaagtattataaaggatatttcatcaaaagaatatatatcatttaatcctaaagaaaataaaattacagtaaaatctaaaaatttacctgagctatctacattattacaagaaattagaaataattctaattcaagtgatattgaactagaagaaaaagtaatgttaacagaatgtgagataaatgttatttcaaatatagatacgcaaattgttgaggaaaggattgaagaagctaagaatttaacttctgactctattaattatataaaagatgaatttaaactaatagaatctatttctgatgcactatgtgacttaaaacaacagaatgaattagaagattctcattttatatcttttgaggacatatcagagactgatgagggatttagtataagatttattaataaagaaactggagaatctatatttgtagaaactgaaaaaacaatattctctgaatatgctaatcatataactgaagagatttctaagataaaaggtactatatttgatactgtaaatggtaagttagtaaaaaaagtaaatttagatactacacacgaagtaaatactttaaatgctgcattttttatacaatcattaatagaatataatagttctaaagaatctcttagtaatttaagtgtagcaatgaaagtccaagtttacgctcaattatttagtactggtttaaatactattacagatgcagccaaagttgttgaattagtatcaactgcattagatgaaactatagacttacttcctacattatctgaaggattacctataattgcaactattatagatggtgtaagtttaggtgcagcaatcaaagagctaagtgaaacgagtgacccattattaagacaagaaatagaagctaagataggtataatggcagtaaatttaacaacagctacaactgcaatcattacttcatctttggggatagctagtggatttagtatacttttagttcctttagcaggaatttcagcaggtataccaagcttagtaaacaatgaacttgtacttcgagataaggcaacaaaggttgtagattattttaaacatgtttcattagttgaaactgaaggagtatttactttattagatgataaaataatgatgccacaagatgatttagtgatatcagaaatagattttaataataattcaatagttttaggtaaatgtgaaatctggagaatggaaggtggttcaggtcatactgtaactgatgatatagatcacttcttttcagcaccatcaataacatatagagagccacacttatctatatatgacgtattggaagtacaaaaagaagaacttgatttgtcaaaagatttaatggtattacctaatgctccaaatagagtatttgcttgggaaacaggatggacaccaggtttaagaagcttagaaaatgatggcacaaaactgttagaccgtataagagataactatgaaggtgagttttattggagatattttgcttttatagctgatgctttaataacaacattaaaaccaagatatgaagatactaatataagaataaatttagatagtaatactagaagttttatagttccaataataactacagaatatataagagaaaaattatcatattctttctatggttcaggaggaacttatgcattgtctctttctcaatataatatgggtataaatatagaattaagtgaaagtgatgtttggattatagatgttgataatgttgtgagagatgtaactatagaatctgataaaattaaaaaaggtgatttaatagaaggtattttatctacactaagtattgaagagaataaaattatcttaaatagccatgagattaatttttctggtgaggtaaatggaagtaatggatttgtttctttaacattttcaattttagaaggaataaatgcaattatagaagttgatttattatctaaatcatataaattacttatttctggcgaattaaaaatattgatgttaaattcaaatcatattcaacagaaaatagattatataggattcaatagcgaattacagaaaaatataccatatagctttgtagatagtgaaggaaaagagaatggttttattaatggttcaacaaaagaaggtttatttgtatctgaattacctgatgtagttcttataagtaaggtttatatggatgatagtaagccttcatttggatattatagtaataatttgaaagatgtcaaagttataactaaagataatgttaatatattaacaggttattatcttaaggatgatataaaaatctctctttctttgactctacaagatgaaaaaactataaagttaaatagtgtgcatttagatgaaagtggagtagctgagattttgaagttcatgaatagaaaaggtaatacaaatacttcagattctttaatgagctttttagaaagtatgaatataaaaagtattttcgttaatttcttacaatctaatattaagtttatattagatgctaattttataataagtggtactacttctattggccaatttgagtttatttgtgatgaaaatgataatatacaaccatatttcattaagtttaatacactagaaactaattatactttatatgtaggaaatagacaaaatatgatagtggaaccaaattatgatttagatgattctggagatatatcttcaactgttatcaatttctctcaaaagtatctttatggaatagacagttgtgttaataaagttgtaatttcaccaaatatttatacagatgaaataaatataacgcctgtatatgaaacaaataatacttatccagaagttattgtattagatgcaaattatataaatgaaaaaataaatgttaatatcaatgatctatctatacgatatgtatggagtaatgatggtaatgattttattcttatgtcaactagtgaagaaaataaggtgtcacaagttaaaataagattcgttaatgtttttaaagataagactttggcaaataagctatcttttaactttagtgataaacaagatgtacctgtaagtgaaataatcttatcatttacaccttcatattatgaggatggattgattggctatgatttgggtctagtttctttatataatgagaaattttatattaataactttggaatgatggtatctggattaatatatattaatgattcattatattattttaaaccaccagtaaataatttgataactggatttgtgactgtaggcgatgataaatactactttaatccaattaatggtggagctgcttcaattggagagacaataattgatgacaaaaattattatttcaaccaaagtggagtgttacaaacaggtgtatttagtacagaagatggatttaaatattttgccccagctaatacacttgatgaaaacctagaaggagaagcaattgattttactggaaaattaattattgacgaaaatatttattattttgatgataattatagaggagctgtagaatggaaagaattagatggtgaaatgcactattttagcccagaaacaggtaaagcttttaaaggtctaaatcaaataggtgattataaatactatttcaattctgatggagttatgcaaaaaggatttgttagtataaatgataataaacactattttgatgattctggtgttatgaaagtaggttacactgaaatagatggcaagcatttctactttgctgaaaacggagaaatgcaaataggagtatttaatacagaagatggatttaaatattttgctcatcataatgaagatttaggaaatgaagaaggtgaagaaatctcatattctggtatattaaatttcaataataaaatttactattttgatgattcatttactgctgtagttggatggaaagatttagaggatggttcaaagtattattttgatgaagatacagcagaagcatatataggtttgtcattaataaatgatggtcaatattattttaatgatgatggaattatgcaagttggatttgtcactataaatgataaagtcttctacttctctgactctggaattatagaatctggagtacaaaacatagatgacaattatttctatatagatgataatggtatagttcaaattggtgtatttgatacttcagatggatataaatattttgcacctgctaatactgtaaatgataatatttacggacaagcagttgaatatagtggtttagttagagttggtgaagatgtatattattttggagaaacatatacaattgagactggatggatatatgatatggaaaatgaaagtgataaatattatttcaatccagaaactaaaaaagcatgcaaaggtattaatttaattgatgatataaaatattattttgatgagaagggcataatgagaacgggtcttatatcatttgaaaataataattattactttaatgagaatggtgaaatgcaatttggttatataaatatagaagataagatgttctattttggtgaagatggtgtcatgcagattggagtatttaatacaccagatggatttaaatactttgcacatcaaaatactttggatgagaattttgagggagaatcaataaactatactggttggttagatttagatgaaaagagatattattttacagatgaatatattgcagcaactggttcagttattattgatggtgaggagtattattttgatcctgatacagctcaattagtgattagtgaatag

SEQ ID NO: 48 - DNA, 21 bp, Artificial Sequence
  Synthetic nucleic acid sequence
tcgtcgtttttcggtgctttt

SEQ ID NO: 49 - protein, 118 aa, Artificial Sequence
  Synthetic amino acid sequence
QVQLQQPGAELVKPGAPVKLSCKASGYSFTSYWMNWVKQRPGRGLEWIGRIDPSNSEIYYNQKFKDKATLTVDKSSSTAYIQLSSLTSEDSAVYYCASGHYGSIFAYWGQGTTLTVSS

SEQ ID NO: 50 - protein, 19 aa, Artificial Sequence
  Synthetic amino acid sequence
MGWSCIILFLVATATGVHS

SEQ ID NO: 51 - protein, 10 aa, Artificial Sequence
  Synthetic amino acid sequence
GYSFTSYWMN

SEQ ID NO: 52 - protein, 15 aa, Artificial Sequence
  Synthetic amino acid sequence
RIDPSNSEIYYNQKF

SEQ ID NO: 53 - protein, 9 aa, Artificial Sequence
  Synthetic amino acid sequence
GHYGSIFAY

SEQ ID NO: 54 - protein, 17 aa, Artificial Sequence
  Synthetic amino acid sequence
AKTTPPSVYPLAPGNSK

SEQ ID NO: 55 - protein, 125 aa, Artificial Sequence
  Synthetic amino acid sequence
VQITQSPSYLAASPGETITINCRASKSISKYLAWYQEKPGKTNKLLLYSGSTLQSGIPSRFSGSRSGTDFTLIISSLEPEDSAMYYCQQHNEYPLTFGAGTKLELKRADAAPTVSIFPPSSEEFQ

SEQ ID NO: 56 - protein, 21 aa, Artificial Sequence
  Synthetic amino acid sequence
MRFQVQVLGLLLLWISGAQCD

SEQ ID NO: 57 - protein, 11 aa, Artificial Sequence
  Synthetic amino acid sequence
RASKSISKYLA

SEQ ID NO: 58 - protein, 7 aa, Artificial Sequence
  Synthetic amino acid sequence
SGSTLQS

SEQ ID NO: 59 - protein, 9 aa, Artificial Sequence
  Synthetic amino acid sequence
QQHNEYPLT

SEQ ID NO: 60 - protein, 121 aa, Artificial Sequence
  Synthetic amino acid sequence
QVQLQQPGAELVKPGASVKLSCKASGYTFTSYWMHWVKQRPGQGLEWIGVINPSNGRSTYSEKFKTTATVTVDKSSSTAYMQLSILTSEDSAVYYCARAYYSTSYYAMDYWGQGTSVTVSS

SEQ ID NO: 61 - protein, 19 aa, Artificial Sequence
  Synthetic amino acid sequence
MGWSYIILFLVATATDVHS

SEQ ID NO: 62 - protein, 10 aa, Artificial Sequence
  Synthetic amino acid sequence
GYTFTSYWMH

SEQ ID NO: 63 - protein, 15 aa, Artificial Sequence
  Synthetic amino acid sequence
VINPSNGRSTYSEKF

SEQ ID NO: 64 - protein, 12 aa, Artificial Sequence
  Synthetic amino acid sequence
AYYSTSYYAMDY

SEQ ID NO: 65 - protein, 17 aa, Artificial Sequence
  Synthetic amino acid sequence
AKTTPPSVYPLAPGNSK

SEQ ID NO: 66 - protein, 130 aa, Artificial Sequence
  Synthetic amino acid sequence
VLMTQSPLSLPVSLGDQASISCRSSQNIVHSNGNTYLEWYLQKPGQSPKLLIYKVSNRFSGVPDRFSGSGSGTYFTLKISRVEAEDLGVYYCFQGSHFPFTFGTGTKLEIKRADAAPTVSIFPPSSEEFQ

SEQ ID NO: 67 - protein, 20 aa, Artificial Sequence
  Synthetic amino acid sequence
MKLPVRLLVLMFWIPASSSD

SEQ ID NO: 68 - protein, 16 aa, Artificial Sequence
  Synthetic amino acid sequence
RSSQNIVHSNGNTYLE

SEQ ID NO: 69 - protein, 7 aa, Artificial Sequence
  Synthetic amino acid sequence
KVSNRFS

SEQ ID NO: 70 - protein, 9 aa, Artificial Sequence
  Synthetic amino acid sequence
FQGSHFPFT

SEQ ID NO: 71 - protein, 118 aa, Artificial Sequence
  Synthetic amino acid sequence
QVQLQQPGAEVVKPGAPVKLSCKASGYPFTNYWMNWVKQRPGRGLEWIGRIDPSNSEIYYNQKFKDKATLTVDKSSSTAYIQLSSLTSEDSAVYYCASGHYGSIFAYWGQGTTLTVSS

SEQ ID NO: 72 - protein, 19 aa, Artificial Sequence
  Synthetic amino acid sequence
MGWSCIILFLVATATGVHS

SEQ ID NO: 73 - protein, 10 aa, Artificial Sequence
  Synthetic amino acid sequence
GYPFTNYWMN

SEQ ID NO: 74 - protein, 15 aa, Artificial Sequence
  Synthetic amino acid sequence
RIDPSNSEIYYNQKF

SEQ ID NO: 75 - protein, 9 aa, Artificial Sequence
  Synthetic amino acid sequence
GHYGSIFAY

SEQ ID NO: 76 - protein, 17 aa, Artificial Sequence
  Synthetic amino acid sequence
AKTTPPSVYPLAPGNSK

SEQ ID NO: 77 - protein, 125 aa, Artificial Sequence
  Synthetic amino acid sequence
VQITQSPSYLAASPGETITINCRASKSISKYLAWYQEKPGKTNKLLIYSGSTLQSGIPSRFSGSRSGTDFTLIISSLEPEDSAMYYCQQHNEYPLTFGAGTKLELKRADAAPTVSIFPPSSEEFQ

SEQ ID NO: 78 - protein, 21 aa, Artificial Sequence
  Synthetic amino acid sequence
MRFQVQVLGLLLLWISGAQCD

SEQ ID NO: 79 - protein, 11 aa, Artificial Sequence
  Synthetic amino acid sequence
RASKSISKYLA

SEQ ID NO: 80 - protein, 7 aa, Artificial Sequence
  Synthetic amino acid sequence
SGSTLQS

SEQ ID NO: 81 - protein, 9 aa, Artificial Sequence
  Synthetic amino acid sequence
QQHNEYPLT

SEQ ID NO: 82 - protein, 2366 aa, Artificial Sequence
  Synthetic amino acid sequence
  MISC_FEATURE (102)..(102): Xaa is any amino acid.
  MISC_FEATURE (270)..(270): Xaa is any amino acid.
  MISC_FEATURE (273)..(273): Xaa is any amino acid.
  MISC_FEATURE (286)..(286): Xaa is any amino acid.
  MISC_FEATURE (288)..(288): Xaa is any amino acid.
  MISC_FEATURE (384)..(384): Xaa is any amino acid.
  MISC_FEATURE (461)..(461): Xaa is any amino acid.
  MISC_FEATURE (463)..(463): Xaa is any amino acid.
  MISC_FEATURE (520)..(520): Xaa is any amino acid.
  MISC_FEATURE (543)..(543): Xaa is any amino acid.
  MISC_FEATURE (544)..(544): Xaa is any amino acid.
  MISC_FEATURE (587)..(587): Xaa is any amino acid.
  MISC_FEATURE (600)..(600): Xaa is any amino acid.
  MISC_FEATURE (653)..(653): Xaa is any amino acid.
  MISC_FEATURE (698)..(698): Xaa is any amino acid.
  MISC_FEATURE (751)..(751): Xaa is any amino acid.
MSLVNRKQLEKMANVRFRTQEDEYVAILDALEEYHNMSENTVVEKYLKLKDINSLTDIYIDTYKKSGRNKALKKFKEYLVTEVLELKNNNLTPVEKNLHFVXIGGQINDTAINYINQWKDVNSDYNVNVFYDSNAFLINTLKKTVVESAINDTLESFRENLNDPRFDYNKFFRKRMEIIYDKQKNFINYYKAQREENPELIIDDIVKTYLSNEYSKEIDELNTYIEESLNKITQNSGNDVRNFEEFKNGESFNLYEQELVERWNLAAASXILXISALKEIGGMYLXVXMLPGIQPDLFESIEKPSSVTVDFWEMTKLEAIMKYKEYIPEYTSEHFDMLDEEVQSSFESVLASKSDKSEIFSSLGDMEASPLEVKIAFNSKGIIXQGLISVKDSYCSNLIVKQIENRYKILNNSLNPAISEDNDFNTTTNTFIDSIMAEANADNGRFMMELGKYLRVGFFPXVXTTINLSGPEAYAAAYQDLLMFKEGSMNIHLIEADLRNFEISKTNISQSTEQEMASLXSFDDARAKAQFEEYKRNYFEGSXXEDDNLDFSQNIVVDKEYLLEKISSLARSSERGYIHYIVQLQGXKISYEAACNLFAXTPYDSVLFQKNIEDSEIAYYYNPGDGEIQEIDKYKIPSIISDRPKIKLTFIGXGKDEFNTDIFAGFDVDSLSTEIEAAIDLAKEDISPKSIEINLLGXNMFSYSINVEETYPGKLLLKVKDKISELMPSISQDSIIVSANQYEVRINSEGXRELLDHSGEWINKEESIIKDISSKEYISFNPKENKITVKSKNLPELSTLLQEIRNNSNSSDIELEEKVMLTECEINVISNIDTQIVEERIEEAKNLTSDSINYIKDEFKLIESISDALCDLKQQNELEDSHFISFEDISETDEGFSIRFINKETGESIFVETEKTIFSEYANHITEEISKIKGTIFDTVNGKLVKKVNLDTTHEVNTLNAAFFIQSLIEYNSSKESLSNLSVAMKVQVYAQLFSTGLNTITDAAKVVELVSTALDETIDLLPTLSEGLPIIATIIDGVSLGAAIKELSETSDPLLRQEIEAKIGIMAVNLTTATTAIITSSLGIASGFSILLVPLAGISAGIPSLVNNELVLRDKATKVVDYFKHVSLVETEGVFTLLDDKIMMPQDDLVISEIDFNNNSIVLGKCEIWRMEGGSGHTVTDDIDHFFSAPSITYREPHLSIYDVLEVQKEELDLSKDLMVLPNAPNRVFAWETGWTPGLRSLENDGTKLLDRIRDNYEGEFYWRYFAFIADALITTLKPRYEDTNIRINLDSNTRSFIVPIITTEYIREKLSYSFYGSGGTYALSLSQYNMGINIELSESDVWIIDVDNVVRDVTIESDKIKKGDLIEGILSTLSIEENKIILNSHEINFSGEVNGSNGFVSLTFSILEGINAIIEVDLLSKSYKLLISGELKILMLNSNHIQQKIDYIGFNSELQKNIPYSFVDSEGKENGFINGSTKEGLFVSELPDVVLISKVYMDDSKPSFGYYSNNLKDVKVITKDNVNILTGYYLKDDIKISLSLTLQDEKTIKLNSVHLDESGVAEILKFMNRKGNTNTSDSLMSFLESMNIKSIFVNFLQSNIKFILDANFIISGTTSIGQFEFICDENDNIQPYFIKFNTLETNYTLYVGNRQNMIVEPNYDLDDSGDISSTVINFSQKYLYGIDSCVNKVVISPNIYTDEINITPVYETNNTYPEVIVLDANYINEKINVNINDLSIRYVWSNDGNDFILMSTSEENKVSQVKIRFVNVFKDKTLANKLSFNFSDKQDVPVSEIILSFTPSYYEDGLIGYDLGLVSLYNEKFYINNFGMMVSGLIYINDSLYYFKPPVNNLITGFVTVGDDKYYFNPINGGAASIGETIIDDKNYYFNQSGVLQTGVFSTEDGFKYFAPANTLDENLEGEAIDFTGKLIIDENIYYFDDNYRGAVEWKELDGEMHYFSPETGKAFKGLNQIGDYKYYFNSDGVMQKGFVSINDNKHYFDDSGVMKVGYTEIDGKHFYFAENGEMQIGVFNTEDGFKYFAHHNEDLGNEEGEEISYSGILNFNNKIYYFDDSFTAVVGWKDLEDGSKYYFDEDTAEAYIGLSLINDGQYYFNDDGIMQVGFVTINDKVFYFSDSGIIESGVQNIDDNYFYIDDNGIVQIGVFDTSDGYKYFAPANTVNDNIYGQAVEYSGLVRVGEDVYYFGETYTIETGWIYDMENESDKYYFNPETKKACKGINLIDDIKYYFDEKGIMRTGLISFENNNYYFNENGEMQFGYINIEDKMFYFGEDGVMQIGVFNTPDGFKYFAHQNTLDENFEGESINYTGWLDLDEKRYYFTDEYIAATGSVIIDGEEYYFDPDTAQLVISE

SEQ ID NO: 83 - protein, 2709 aa, Artificial Sequence
  Synthetic amino acid sequence
SLISKEELIKLAYSIRPRENEYKTILTNLDEYNKLTTNNNENKYLQLKKLNESIDVFMNKYKTSSRNRALSNLKKDILKEVILIKNSNTSPVEKNLHFVWIGGEVSDIALEYIKQWADINAEYNIKLWYDSEAFLVNTLKKAIVESSTTEALQLLEEEIQNPQFDNMKFYKKRMEFIYDRQKRFINYYKSQINKPTVPTIDDIIKSHLVSEYNRDETVLESYRTNSLRKINSNHGIDIRANSLFTEQELLNIYSQELLNRGNLAAASAIVALLALKNFGGVYLAVAMLPGIHSDLFKTISRPSSIGLDRWEMIKLEAIMKYKKYINNYTSENFDKLDQQLKDNFKLIIESKSEKSEIFSKLENLNVSDLEIKIAFALGSVINQALISKQGSYLTNLVIEQVKNRYQFLNQHLNPAIESDNNFTDTTKIFHDSLFNSATAENSMFLTKIAPYLQVGFMPAAASTISLSGPGAYASAYYDFINLQENTIEKTLKASDLIEFKFPENNLSQLTEQEINSLWSFDQASAKYQFEKYVRDYTGGSLSEDNGVDFNKNTALDKNYLLNNKIPSNNVEEAGSKNYVHYIIQLQGDDISYEATCNLFSKNPKNSIIIQRNMNESAKSYFLSDDGESILELNKYRIPERLKNKEKVKVTFIGHGKDEFNTSEFARLSVDSLSNEISSFLDTIKLDISPKNVEVNLLGANMFSYDFNVEETYPGKLLLSIMDKITSTLPDVNKNSITIGANQYEVRINSEGRKELLAHSGKWINKEEAIMSDLSSKEYIFFDSIDNKLKAKSKNIPGLASISEDIKTLLLDASVSPDTKFILNNLKLNIESSIGDYIYYEKLEPVKNIIHNSIDDLIDEFNLLENVSDELYELKKLNNLDEKYLISFEDISKNNSTYSVRFINKSNGESVYVETEKEIFSKYSEHITKEISTIKNSIITDVNGNLLDNIQLDHTSQVNTLNAAFFIQSLIDYSSNKDVLNDLSTSVKVQLYAQLFSTGLNTIYDSIQLVNLISNAVNDTINVLPTITEGIPIVSTILDGINLGAAIKELLDEHDPLLKKELEAKVGVLAINMSLSIAATVASIVGIGAEVTIFLLPIAGISAGIPSLVNNELILHDKATSVVNYFNHLSESKKYGPLKTEDDKILVPIDDLVISEIDFNNNSIKLGTCNILAMEGGSGHTVTGNIDHFFSSPSISSHIPSLSIYSAIGIETENLDFSKKIMMLPNAPSRVFWWETGAVPGLRSLENDGTRLLDSIRDLYPGKFYWRFYAFFDYAITTLKPVYEDTNIKIKLDKDTRNFIMPTITTNEIRNKLSYSFDGAGGTYSLLLSSYPISTNINLSKDDLWIFNIDNEVREISIENGTIKKGKLIKDVLSKIDINKNKLIIGNQTIDFSGDIDNKDRYIFLTCELDDKISLIIEINLVAKSYSLLLSGDKNYLISNLSNIIEKINTLGLDSKNIAYNYTDESNNKYFGAISKTSQKSIIHYKKDSKNILEFYNDSTLEFNSKDFIAEDINVFMKDDINTITGKYYVDNNTDKSIDFSISLVSKNQVKVNGLYLNESVYSSYLDFVKNSDGHHNTSNFMNLFLDNISFWKLFGFENINFVIDKYFTLVGKTNLGYVEFICDNNKNIDIYFGEWKTSSSKSTIFSGNGRNVVVEPIYNPDTGEDISTSLDFSYEPLYGIDRYINKVLIAPDLYTSLININTNYYSNEYYPEIIVLNPNTFHKKVNINLDSSSFEYKWSTEGSDFILVRYLEESNKKILQKIRIKGILSNTQSFNKMSIDFKDIKKLSLGYIMSNFKSFNSENELDRDHLGFKIIDNKTYYYDEDSKLVKGLININNSLFYFDPIEFNLVTGWQTINGKKYYFDINTGAALISYKIINGKHFYFNNDGVMQLGVFKGPDGFEYFAPANTQNNNIEGQAIVYQSKFLTLNGKKYYFDNDSKAVTGWRIINNEKYYFNPNNAIAAVGLQVIDNNKYYFNPDTAIISKGWQTVNGSRYYFDTDTAIAFNGYKTIDGKHFYFDSDCVVKIGVFSTSNGFEYFAPANTYNNNIEGQAIVYQSKFLTLNGKKYYFDNNSKAVTGWQTIDSKKYYFNTNTAEAATGWQTIDGKKYYFNTNTAEAATGWQTIDGKKYYFNTNTAIASTGYTIINGKHFYFNTDGIMQIGVFKGPNGFEYFAPANTDANNIEGQAILYQNEFLTLNGKKYYFGSDSKAVTGWRIINNKKYYFNPNNAIAAIHLCTINNDKYYFSYDGILQNGYITIERNNFYFDANNESKMVTGVFKGPNGFEYFAPANTHNNNIEGQAIVYQNKFLTLNGKKYYFDNDSKAVTGWQTIDGKKYYFNLNTAEAATGWQTIDGKKYYFNLNTAEAATGWQTIDGKKYYFNTNTFIASTGYTSINGKHFYFNTDGIMQIGVFKGPNGFEYFAPANTHNNNIEGQAILYQNKFLTLNGKKYYFGSDSKAVTGLRTIDGKKYYFNTNTAVAVTGWQTINGKKYYFNTNTSIASTGYTIISGKHFYFNTDGIMQIGVFKGPDGFEYFAPANTDANNIEGQAIRYQNRFLYLHDNIYYFGNNSKAATGWVTIDGNRYYFEPNTAMGANGYKTIDNKNFYFRNGLPQIGVFKGSNGFEYFAPANTDANNIEGQAIRYQNRFLHLLGKIYYFGNNSKAVTGWQTINGKVYYFMPDTAMAAAGGLFEIDGVIYFFGVDGVKAPGIYG

SEQ ID NO: 84 - protein, 2709 aa, Artificial Sequence
  Synthetic amino acid sequence
SLISKEELIKLAYSIRPRENEYKTILTNLDEYNKLTTNNNENKYLQLKKLNESIDVFMNKYKTSSRNRALSNLKKDILKEVILIKNSNTSPVEKNLHFVWIGGEVSDIALEYIKQWADINAEYNIKLWYDSEAFLVNTLKKAIVESSTTEALQLLEEEIQNPQFDNMKFYKKRMEFIYDRQKRFINYYKSQINKPTVPTIDDIIKSHLVSEYNRDETVLESYRTNSLRKINSNHGIDIRANSLFTEQELLNIYSQELLNRGNLAAASDIVRLLALKNFGGVYLAVAMLPGIHSDLFKTISRPSSIGLDRWEMIKLEAIMKYKKYINNYTSENFDKLDQQLKDNFKLIIESKSEKSEIFSKLENLNVSDLEIKIAFALGSVINQALISKQGSYLTNLVIEQVKNRYQFLNQHLNPAIESDNNFTDTTKIFHDSLFNSATAENSMFLTKIAPYLQVGFMPEARSTISLSGPGAYASAYYDFINLQENTIEKTLKASDLIEFKFPENNLSQLTEQEINSLWSFDQASAKYQFEKYVRDYTGGSLSEDNGVDFNKNTALDKNYLLNNKIPSNNVEEAGSKNYVHYIIQLQGDDISYEATCNLFSKNPKNSIIIQRNMNESAKSYFLSDDGESILELNKYRIPERLKNKEKVKVTFIGHGKDEFNTSEFARLSVDSLSNEISSFLDTIKLDISPKNVEVNLLGANMFSYDFNVEETYPGKLLLSIMDKITSTLPDVNKNSITIGANQYEVRINSEGRKELLAHSGKWINKEEAIMSDLSSKEYIFFDSIDNKLKAKSKNIPGLASISEDIKTLLLDASVSPDTKFILNNLKLNIESSIGDYIYYEKLEPVKNIIHNSIDDLIDEFNLLENVSDELYELKKLNNLDEKYLISFEDISKNNSTYSVRFINKSNGESVYVETEKEIFSKYSEHITKEISTIKNSIITDVNGNLLDNIQLDHTSQVNTLNAAFFIQSLIDYSSNKDVLNDLSTSVKVQLYAQLFSTGLNTIYDSIQLVNLISNAVNDTINVLPTITEGIPIVSTILDGINLGAAIKELLDEHDPLLKKELEAKVGVLAINMSLSIAATVASIVGIGAEVTIFLLPIAGISAGIPSLVNNELILHDKATSVVNYFNHLSESKKYGPLKTEDDKILVPIDDLVISEIDFNNNSIKLGTCNILAMEGGSGHTVTGNIDHFFSSPSISSHIPSLSIYSAIGIETENLDFSKKIMMLPNAPSRVFWWETGAVPGLRSLENDGTRLLDSIRDLYPGKFYWRFYAFFDYAITTLKPVYEDTNIKIKLDKDTRNFIMPTITTNEIRNKLSYSFDGAGGTYSLLLSSYPISTNINLSKDDLWIFNIDNEVREISIENGTIKKGKLIKDVLSKIDINKNKLIIGNQTIDFSGDIDNKDRYIFLTCELDDKISLIIEINLVAKSYSLLLSGDKNYLISNLSNIIEKINTLGLDSKNIAYNYTDESNNKYFGAISKTSQKSIIHYKKDSKNILEFYNDSTLEFNSKDFIAEDINVFMKDDINTITGKYYVDNNTDKSIDFSISLVSKNQVKVNGLYLNESVYSSYLDFVKNSDGHHNTSNFMNLFLDNISFWKLFGFENINFVIDKYFTLVGKTNLGYVEFICDNNKNIDIYFGEWKTSSSKSTIFSGNGRNVVVEPIYNPDTGEDISTSLDFSYEPLYGIDRYINKVLIAPDLYTSLININTNYYSNEYYPEIIVLNPNTFHKKVNINLDSSSFEYKWSTEGSDFILVRYLEESNKKILQKIRIKGILSNTQSFNKMSIDFKDIKKLSLGYIMSNFKSFNSENELDRDHLGFKIIDNKTYYYDEDSKLVKGLININNSLFYFDPIEFNLVTGWQTINGKKYYFDINTGAALISYKIINGKHFYFNNDGVMQLGVFKGPDGFEYFAPANTQNNNIEGQAIVYQSKFLTLNGKKYYFDNDSKAVTGWRIINNEKYYFNPNNAIAAVGLQVIDNNKYYFNPDTAIISKGWQTVNGSRYYFDTDTAIAFNGYKTIDGKHFYFDSDCVVKIGVFSTSNGFEYFAPANTYNNNIEGQAIVYQSKFLTLNGKKYYFDNNSKAVTGWQTIDSKKYYFNTNTAEAATGWQTIDGKKYYFNTNTAEAATGWQTIDGKKYYFNTNTAIASTGYTIINGKHFYFNTDGIMQIGVFKGPNGFEYFAPANTDANNIEGQAILYQNEFLTLNGKKYYFGSDSKAVTGWRIINNKKYYFNPNNAIAAIHLCTINNDKYYFSYDGILQNGYITIERNNFYFDANNESKMVTGVFKGPNGFEYFAPANTHNNNIEGQAIVYQNKFLTLNGKKYYFDNDSKAVTGWQTIDGKKYYFNLNTAEAATGWQTIDGKKYYFNLNTAEAATGWQTIDGKKYYFNTNTFIASTGYTSINGKHFYFNTDGIMQIGVFKGPNGFEYFAPANTHNNNIEGQAILYQNKFLTLNGKKYYFGSDSKAVTGLRTIDGKKYYFNTNTAVAVTGWQTINGKKYYFNTNTSIASTGYTIISGKHFYFNTDGIMQIGVFKGPDGFEYFAPANTDANNIEGQAIRYQNRFLYLHDNIYYFGNNSKAATGWVTIDGNRYYFEPNTAMGANGYKTIDNKNFYFRNGLPQIGVFKGSNGFEYFAPANTDANNIEGQAIRYQNRFLHLLGKIYYFGNNSKAVTGWQTINGKVYYFMPDTAMAAAGGLFEIDGVIYFFGVDGVKAPGIYG

SEQ ID NO: 85 - protein, 2365 aa, Artificial Sequence
  Synthetic amino acid sequence
SLVNRKQLEKMANVRFRTQEDEYVAILDALEEYHNMSENTVVEKYLKLKDINSLTDIYIDTYKKSGRNKALKKFKEYLVTEVLELKNNNLTPVEKNLHFVWIGGQINDTAINYINQWKDVNSDYNVNVFYDSNAFLINTLKKTVVESAINDTLESFRENLNDPRFDYNKFFRKRMEIIYDKQKNFINYYKAQREENPELIIDDIVKTYLSNEYSKEIDELNTYIEESLNKITQNSGNDVRNFEEFKNGESFNLYEQELVERWNLAAASAILAISALKEIGGMYLAVAMLPGIQPDLFESIEKPSSVTVDFWEMTKLEAIMKYKEYIPEYTSEHFDMLDEEVQSSFESVLASKSDKSEIFSSLGDMEASPLEVKIAFNSKGIINQGLISVKDSYCSNLIVKQIENRYKILNNSLNPAISEDNDFNTTTNTFIDSIMAEANADNGRFMMELGKYLRVGFFPAVATTINLSGPEAYAAAYQDLLMFKEGSMNIHLIEADLRNFEISKTNISQSTEQEMASLWSFDDARAKAQFEEYKRNYFEGSLGEDDNLDFSQNIVVDKEYLLEKISSLARSSERGYIHYIVQLQGDKISYEAACNLFAKTPYDSVLFQKNIEDSEIAYYYNPGDGEIQEIDKYKIPSIISDRPKIKLTFIGHGKDEFNTDIFAGFDVDSLSTEIEAAIDLAKEDISPKSIEINLLGANMFSYSINVEETYPGKLLLKVKDKISELMPSISQDSIIVSANQYEVRINSEGRRELLDHSGEWINKEESIIKDISSKEYISFNPKENKITVKSKNLPELSTLLQEIRNNSNSSDIELEEKVMLTECEINVISNIDTQIVEERIEEAKNLTSDSINYIKDEFKLIESISDALCDLKQQNELEDSHFISFEDISETDEGFSIRFINKETGESIFVETEKTIFSEYANHITEEISKIKGTIFDTVNGKLVKKVNLDTTHEVNTLNAAFFIQSLIEYNSSKESLSNLSVAMKVQVYAQLFSTGLNTITDAAKVVELVSTALDETIDLLPTLSEGLPIIATIIDGVSLGAAIKELSETSDPLLRQEIEAKIGIMAVNLTTATTAIITSSLGIASGFSILLVPLAGISAGIPSLVNNELVLRDKATKVVDYFKHVSLVETEGVFTLLDDKIMMPQDDLVISEIDFNNNSIVLGKCEIWRMEGGSGHTVTDDIDHFFSAPSITYREPHLSIYDVLEVQKEELDLSKDLMVLPNAPNRVFAWETGWTPGLRSLENDGTKLLDRIRDNYEGEFYWRYFAFIADALITTLKPRYEDTNIRINLDSNTRSFIVPIITTEYIREKLSYSFYGSGGTYALSLSQYNMGINIELSESDVWIIDVDNVVRDVTIESDKIKKGDLIEGILSTLSIEENKIILNSHEINFSGEVNGSNGFVSLTFSILEGINAIIEVDLLSKSYKLLISGELKILMLNSNHIQQKIDYIGFNSELQKNIPYSFVDSEGKENGFINGSTKEGLFVSELPDVVLISKVYMDDSKPSFGYYSNNLKDVKVITKDNVNILTGYYLKDDIKISLSLTLQDEKTIKLNSVHLDESGVAEILKFMNRKGNTNTSDSLMSFLESMNIKSIFVNFLQSNIKFILDANFIISGTTSIGQFEFICDENDNIQPYFIKFNTLETNYTLYVGNRQNMIVEPNYDLDDSGDISSTVINFSQKYLYGIDSCVNKVVISPNIYTDEINITPVYETNNTYPEVIVLDANYINEKINVNINDLSIRYVWSNDGNDFILMSTSEENKVSQVKIRFVNVFKDKTLANKLSFNFSDKQDVPVSEIILSFTPSYYEDGLIGYDLGLVSLYNEKFYINNFGMMVSGLIYINDSLYYFKPPVNNLITGFVTVGDDKYYFNPINGGAASIGETIIDDKNYYFNQSGVLQTGVFSTEDGFKYFAPANTLDENLEGEAIDFTGKLIIDENIYYFDDNYRGAVEWKELDGEMHYFSPETGKAFKGLNQIGDYKYYFNSDGVMQKGFVSINDNKHYFDDSGVMKVGYTEIDGKHFYFAENGEMQIGVFNTEDGFKYFAHHNEDLGNEEGEEISYSGILNFNNKIYYFDDSFTAVVGWKDLEDGSKYYFDEDTAEAYIGLSLINDGQYYFNDDGIMQVGFVTINDKVFYFSDSGIIESGVQNIDDNYFYIDDNGIVQIGVFDTSDGYKYFAPANTVNDNIYGQAVEYSGLVRVGEDVYYFGETYTIETGWIYDMENESDKYYFNPETKKACKGINLIDDIKYYFDEKGIMRTGLISFENNNYYFNENGEMQFGYINIEDKMFYFGEDGVMQIGVFNTPDGFKYFAHQNTLDENFEGESINYTGWLDLDEKRYYFTDEYIAATGSVIIDGEEYYFDPDTAQLVISE

SEQ ID NO: 86 - protein, 2365 aa, Artificial Sequence
  Synthetic amino acid sequence
SLVNRKQLEKMANVRFRTQEDEYVAILDALEEYHNMSENTVVEKYLKLKDINSLTDIYIDTYKKSGRNKALKKFKEYLVTEVLELKNNNLTPVEKNLHFVWIGGQINDTAINYINQWKDVNSDYNVNVFYDSNAFLINTLKKTVVESAINDTLESFRENLNDPRFDYNKFFRKRMEIIYDKQKNFINYYKAQREENPELIIDDIVKTYLSNEYSKEIDELNTYIEESLNKITQNSGNDVRNFEEFKNGESFNLYEQELVERWNLAAASDILRISALKEIGGMYLAVAMLPGIQPDLFESIEKPSSVTVDFWEMTKLEAIMKYKEYIPEYTSEHFDMLDEEVQSSFESVLASKSDKSEIFSSLGDMEASPLEVKIAFNSKGIINQGLISVKDSYCSNLIVKQIENRYKILNNSLNPAISEDNDFNTTTNTFIDSIMAEANADNGRFMMELGKYLRVGFFPDVKTTINLSGPEAYAAAYQDLLMFKEGSMNIHLIEADLRNFEISKTNISQSTEQEMASLWSFDDARAKAQFEEYKRNYFEGSLGEDDNLDFSQNIVVDKEYLLEKISSLARSSERGYIHYIVQLQGDKISYEAACNLFAKTPYDSVLFQKNIEDSEIAYYYNPGDGEIQEIDKYKIPSIISDRPKIKLTFIGHGKDEFNTDIFAGFDVDSLSTEIEAAIDLAKEDISPKSIEINLLGANMFSYSINVEETYPGKLLLKVKDKISELMPSISQDSIIVSANQYEVRINSEGRRELLDHSGEWINKEESIIKDISSKEYISFNPKENKITVKSKNLPELSTLLQEIRNNSNSSDIELEEKVMLTECEINVISNIDTQIVEERIEEAKNLTSDSINYIKDEFKLIESISDALCDLKQQNELEDSHFISFEDISETDEGFSIRFINKETGESIFVETEKTIFSEYANHITEEISKIKGTIFDTVNGKLVKKVNLDTTHEVNTLNAAFFIQSLIEYNSSKESLSNLSVAMKVQVYAQLFSTGLNTITDAAKVVELVSTALDETIDLLPTLSEGLPIIATIIDGVSLGAAIKELSETSDPLLRQEIEAKIGIMAVNLTTATTAIITSSLGIASGFSILLVPLAGISAGIPSLVNNELVLRDKATKVVDYFKHVSLVETEGVFTLLDDKIMMPQDDLVISEIDFNNNSIVLGKCEIWRMEGGSGHTVTDDIDHFFSAPSITYREPHLSIYDVLEVQKEELDLSKDLMVLPNAPNRVFAWETGWTPGLRSLENDGTKLLDRIRDNYEGEFYWRYFAFIADALITTLKPRYEDTNIRINLDSNTRSFIVPIITTEYIREKLSYSFYGSGGTYALSLSQYNMGINIELSESDVWIIDVDNVVRDVTIESDKIKKGDLIEGILSTLSIEENKIILNSHEINFSGEVNGSNGFVSLTFSILEGINAIIEVDLLSKSYKLLISGELKILMLNSNHIQQKIDYIGFNSELQKNIPYSFVDSEGKENGFINGSTKEGLFVSELPDVVLISKVYMDDSKPSFGYYSNNLKDVKVITKDNVNILTGYYLKDDIKISLSLTLQDEKTIKLNSVHLDESGVAEILKFMNRKGNTNTSDSLMSFLESMNIKSIFVNFLQSNIKFILDANFIISGTTSIGQFEFICDENDNIQPYFIKFNTLETNYTLYVGNRQNMIVEPNYDLDDSGDISSTVINFSQKYLYGIDSCVNKVVISPNIYTDEINITPVYETNNTYPEVIVLDANYINEKINVNINDLSIRYVWSNDGNDFILMSTSEENKVSQVKIRFVNVFKDKTLANKLSFNFSDKQDVPVSEIILSFTPSYYEDGLIGYDLGLVSLYNEKFYINNFGMMVSGLIYINDSLYYFKPPVNNLITGFVTVGDDKYYFNPINGGAASIGETIIDDKNYYFNQSGVLQTGVFSTEDGFKYFAPANTLDENLEGEAIDFTGKLIIDENIYYFDDNYRGAVEWKELDGEMHYFSPETGKAFKGLNQIGDYKYYFNSDGVMQKGFVSINDNKHYFDDSGVMKVGYTEIDGKHFYFAENGEMQIGVFNTEDGFKYFAHHNEDLGNEEGEEISYSGILNFNNKIYYFDDSFTAVVGWKDLEDGSKYYFDEDTAEAYIGLSLINDGQYYFNDDGIMQVGFVTINDKVFYFSDSGIIESGVQNIDDNYFYIDDNGIVQIGVFDTSDGYKYFAPANTVNDNIYGQAVEYSGLVRVGEDVYYFGETYTIETGWIYDMENESDKYYFNPETKKACKGINLIDDIKYYFDEKGIMRTGLISFENNNYYFNENGEMQFGYINIEDKMFYFGEDGVMQIGVFNTPDGFKYFAHQNTLDENFEGESINYTGWLDLDEKRYYFTDEYIAATGSVIIDGEEYYFDPDTAQLVISE

SEQ ID NO: 87 - protein, 2710 aa, Clostridium difficile; identical to SEQ ID NO: 15

SEQ ID NO: 88 - protein, 2710 aa, Clostridium difficile
MSLISKEELIKLAYSIRPRENEYKTILTNLDEYNKLTTNNNENKYLQLKKLNESIDVFMNKYKTSSRNRALSNLKKDILKEVILIKNSNTSPVEKNLHFVWIGGEVSDIALEYIKQWADINAEYNIKLWYDSEAFLVNTLKKAIVESSTTEALQLLEEEIQNPQFDNMKFYKKRMEFIYDRQKRFINYYKSQINKPTVPTIDDIIKSHLVSEYNRDETVLESYRTNSLRKINSNHGIDIRANSLFTEQELLNIYSQELLNRGNLAAASDIVRLLALKNFGGVYLDVDMLPGIHSDLFKTISRPSSIGLDRWEMIKLEAIMKYKKYINNYTSENFDKLDQQLKDNFKLIIESKSEKSEIFSKLENLNVSDLEIKIAFALGSVINQALISKQGSYLTNLVIEQVKNRYQFLNQHLNPAIESDNNFTDTTKIFHDSLFNSATAENSMFLTKIAPYLQVGFMPEARSTISLSGPGAYASAYYDFINLQENTIEKTLKASDLIEFKFPENNLSQLTEQEINSLWSFDQASAKYQFEKYVRDYTGGSLSEDNGVDFNKNTALDKNYLLNNKIPSNNVEEAGSKNYVHYIIQLQGDDISYEATCNLFSKNPKNSIIIQRNMNESAKSYFLSDDGESILELNKYRIPERLKNKEKVKVTFIGHGKDEFNTSEFARLSVDSLSNEISSFLDTIKLDISPKNVEVNLLGCNMFSYDFNVEETYPGKLLLSIMDKITSTLPDVNKNSITIGANQYEVRINSEGRKELLAHSGKWINKEEAIMSDLSSKEYIFFDSIDNKLKAKSKNIPGLASISEDIKTLLLDASVSPDTKFILNNLKLNIESSIGDYIYYEKLEPVKNIIHNSIDDLIDEFNLLENVSDELYELKKLNNLDEKYLISFEDISKNNSTYSVRFINKSNGESVYVETEKEIFSKYSEHITKEISTIKNSIITDVNGNLLDNIQLDHTSQVNTLNAAFFIQSLIDYSSNKDVLNDLSTSVKVQLYAQLFSTGLNTIYDSIQLVNLISNAVNDTINVLPTITEGIPIVSTILDGINLGAAIKELLDEHDPLLKKELEAKVGVLAINMSLSIAATVASIVGIGAEVTIFLLPIAGISAGIPSLVNNELILHDKATSVVNYFNHLSESKKYGPLKTEDDKILVPIDDLVISEIDFNNNSIKLGTCNILAMEGGSGHTVTGNIDHFFSSPSISSHIPSLSIYSAIGIETENLDFSKKIMMLPNAPSRVFWWETGAVPGLRSLENDGTRLLDSIRDLYPGKFYWRFYAFFDYAITTLKPVYEDTNIKIKLDKDTRNFIMPTITTNEIRNKLSYSFDGAGGTYSLLLSSYPISTNINLSKDDLWIFNIDNEVREISIENGTIKKGKLIKDVLSKIDINKNKLIIGNQTIDFSGDIDNKDRYIFLTCELDDKISLIIEINLVAKSYSLLLSGDKNYLISNLSNTIEKINTLGLDSKNIAYNYTDESNNKYFGAISKTSQKSIIHYKKDSKNILEFYNDSTLEFNSKDFIAEDINVFMKDDINTITGKYYVDNNTDKSIDFSISLVSKNQVKVNGLYLNESVYSSYLDFVKNSDGHHNTSNFMNLFLDNISFWKLFGFENINFVIDKYFTLVGKTNLGYVEFICDNNKNIDIYFGEWKTSSSKSTIFSGNGRNVVVEPIYNPDTGEDISTSLDFSYEPLYGIDRYINKVLIAPDLYTSLININTNYYSNEYYPEIIVLNPNTFHKKVNINLDSSSFEYKWSTEGSDFILVRYLEESNKKILQKIRIKGILSNTQSFNKMSIDFKDIKKLSLGYIMSNFKSFNSENELDRDHLGFKIIDNKTYYYDEDSKLVKGLININNSLFYFDPIEFNLVTGWQTINGKKYYFDINTGAALTSYKIINGKHFYFNNDGVMQLGVFKGPDGFEYFAPANTQNNNIEGQAIVYQSKFLTLNGKKYYFDNDSKAVTGWRIINNEKYYFNPNNAIAAVGLQVIDNNKYYFNPDTAIISKGWQTVNGSRYYFDTDTAIAFNGYKTIDGKHFYFDSDCVVKIGVFSTSNGFEYFAPANTYNNNIEGQAIVYQSKFLTLNGKKYYFDNNSKAVTGWQTIDSKKYYFNTNTAEAATGWQTIDGKKYYFNTNTAEAATGWQTIDGKKYYFNTNTAIASTGYTIINGKHFYFNTDGIMQIGVFKGPNGFEYFAPANTDANNIEGQAILYQNEFLTLNGKKYYFGSDSKAVTGWRIINNKKYYFNPNNAIAAIHLCTINNDKYYFSYDGILQNGYITIERNNFYFDANNESKMVTGVFKGPNGFEYFAPANTHNNNIEGQAIVYQNKFLTLNGKKYYFDNDSKAVTGWQTIDGKKYYFNLNTAEAATGWQTIDGKKYYFNLNTAEAATGWQTIDGKKYYFNTNTFIASTGYTSINGKHFYFNTDGIMQIGVFKGPNGFEYFAPANTHNNNIEGQAILYQNKFLTLNGKKYYFGSDSKAVTGLRTIDGKKYYFNTNTAVAVTGWQTINGKKYYFNTNTSIASTGYTIISGKHFYFNTDGIMQIGVFKGPDGFEYFAPANTDANNIEGQAIRYQNRFLYLHDNIYYFGNNSKAATGWVTIDGNRYYFEPNTAMGANGYKTIDNKNFYFRNGLPQIGVFKGSNGFEYFAPANTDANNIEGQAIRYQNRFLHLLGKIYYFGNNSKAVTGWQTINGKVYYFMPDTAMAAAGGLFEIDGVIYFFGVDGVKAPGIYG

SEQ ID NO: 89 - protein, 2710 aa, Clostridium difficile; identical to SEQ ID NO: 15

SEQ ID NO: 90 - protein, 2710 aa, Clostridium difficile; identical to SEQ ID NO: 88

SEQ ID NO: 91 - protein, 2710 aa, Clostridium difficile; identical to SEQ ID NO: 88

SEQ ID NO: 92 - protein, 2710 aa, Clostridium difficile
MSLISKEELIKLAYSIRPRENEYKTILTNLDEYNKLTTNNNENKYLQLKKLNESIDVFMNKYKTSSRNRALSNLKKDILKEVILIKNSNTSPVEKNLHFVWIGGEVSDIALEYIKQWADINAEYNIKLWYDSEAFLVNTLKKAIVESSTTEALQLLEEEIQNPQFDNMKFYKKRMEFIYDRQKRFINYYKSQINKPTVPTIDDIIKSHLVSEYNRDETVLESYRTNSLRKINSNHGIDIRANSLFTEQELLNIYSQELLNRGNLAAASDIVRLLALKNFGGVYLDVDMLPGIHSDLFKTISRPSSIGLDRWEMIKLEAIMKYKKYINNYTSENFDKLDQQLKDNFKLIIESKSEKSEIFSKLENLNVSDLEIKIAFALGSVINQALISKQGSYLTNLVIEQVKNRYQFLNQHLNPAIESDNNFTDTTKIFHDSLFNSATAENSMFLTKIAPYLQVGFMPEARSTISLSGPGAYASAYYDFINLQENTIEKTLKASDLIEFKFPENNLSQLTEQEINSLWSFDQASAKYQFEKYVRDYTGGSLSEDNGVDFNKNTALDKNYLLNNKIPSNNVEEAGSKNYVHYIIQLQGDDISYEATCNLFSKNPKNSIIIQRNMNESAKSYFLSDDGESILELNKYRIPERLKNKEKVKVTFIGHGKDEFNTSEFARLSVDSLSNEISSFLDTIKLDISPKNVEVNLLGCNMFSYDFNVEETYPGKLLLSIMDKITSTLPDVNKNSITIGANQYEVRINSEGRKELLAHSGKWINKEEAIMSDLSSKEYIFFDSIDNKLKAKSKNIPGLASISEDIKTLLLDASVSPDTKFILNNLKLNIESSIGDYIYYEKLEPVKNIIHNSIDDLIDEFNLLENVSDELYELKKLNNLDEKYLISFEDISKNNSTYSVRFINKSNGESVYVETEKEIFSKYSEHITKEISTIKNSIITDVNGNLLDNIQLDHTSQVNTLNAAFFIQSLIDYSSNKDVLNDLSTSVKVQLYAQLFSTGLNTIYDSIQLVNLISNAVNDTINVLPTITEGIPIVSTILDGINLGAAIKELLDEHDPLLKKELEAKVGVLAINMSLSIAATVASIVGIGAEVTIFLLPIAGISAGIPSLVNNELILHDKATSVVNYFNHLSESKKYGPLKTEDDKILVPIDDLVISEIDFNNNSIKLGTCNILAMEGGSGHTVTGNIDHFFSSPSISSHIPSLSIYSAIGIETENLDFSKKIMMLPNAPSRVFWWETGAVPGLRSLENDGTRLLDSIRDLYPGKFYWRFYAFFDYAITTLKPVYEDTNIKIKLDKDTRNFIMPTITTNEIRNKLSYSFDGAGGTYSLLLSSYPISTNINLSKDDLWIFNIDNEVREISIENGTIKKGKLIKDVLSKIDINKNKLIIGNQTIDFSGDIDNKDRYIFLTCELDDKISLIIEINLVAKSYSLLLSGDKNYLISNLSNTIEKINTLGLDSKNIAYNYTDESNNKYFGAISKTSQKSIIHYKKDSKNILEFYNDSTLEFNSKDFIAEDINVFMKDDVNTITGKYYVDNNTDKSIDFSISLVSKNQVKVNGLYLNESVYSSYLDFVKNSDGHHNTSNFMNLFLDNISFWKLFGFENINFVIDKYFTLVGKTNLGYVEFICDNNKNIDIYFGEWKTSSSKSTIFSGNGRNVVVEPIYNPDTGEDISTSLDFSYEPLYGIDRYINKVLIAPDLYTSLININTNYYSNEYYPEIIVLNPNTFHKKVNINLDSSSFEYKWSTEGSDFILVRYLEESNKKILQKIRIKGILSNTQSFNKMSIDFKDIKKLSLGYIMSNFKSFNSENELDRDHLGFKIIDNKTYYYDEDSKLVKGLININNSLFYFDPIEFNLVTGWQTINGKKYYFDINTGAALTSYKIINGKHFYFNNDGVMQLGVFKGPDGFEYFAPANTQNNNIEGQAIVYQSKFLTLNGKKYYFDNNSKAVTGWRIINNEKYYFNPNNAIAAVGLQVIDNNKYYFNPDTAIISKGWQTVNGSRYYFDTDTAIAFNGYKTIDGKHFYFDSDCVVKIGVFSTSNGFEYFAPANTYNNNIEGQAIVYQSKFLTLNGKKYYFDNNSKAVTGWQTIDSKKYYFNTNTAEAATGWQTIDGKKYYFNTNTAEAATGWQTIDGKKYYFNTNTAIASTGYTIINGKHFYFNTDGIMQIGVFKGPNGFEYFAPANTDANNIEGQAILYQNEFLTLNGKKYYFGSDSKAVTGWRIINNKKYYFNPNNAIAAIHLCTINNDKYYFSYDGILQNGYITIERNNFYFDANNESKMVTGVFKGPNGFEYFAPANTHNNNIEGQAIVYQNKFLTLNGKKYYFDNDSKAVTGWQTIDGKKYYFNLNTAEAATGWQTIDGKKYYFNLNTAEAATGWQTIDGKKYYFNTNTFIASTGYTSINGKHFYFNTDGIMQIGVFKGPNGFEYFAPANTDANNIEGQAILYQNKFLTLNGKKYYFGSDSKAVTGLRTIDGKKYYFNTNTAVAVTGWQTINGKKYYFNTNTSIASTGYTIISGKHFYFNTDGIMQIGVFKGPDGFEYFAPANTDANNIEGQAIRYQNRFLYLHDNIYYFGNNSKAATGWVTIDGNRYYFEPNTAMGANGYKTIDNKNFYFRNGLPQIGVFKGSNGFEYFAPANTDANNIEGQAIRYQNRFLHLLGKIYYFGNNSKAVTGWQTINGKVYYFMPDTAMAAAGGLFEIDGVIYFFGVDGVKAPGIYG

SEQ ID NO: 93 - protein, 2710 aa, Clostridium difficile
MSLISKEELIKLAYSIRPRENEYKTILTNLDEYNKLTTNNNENKYLQLKKLNESIDVFMNKYKNSSRNRALSNLKKDILKEVILIKNSNTSPVEKNLHFVWIGGEVSDIALEYIKQWADINAEYNIKLWYDSEAFLVNTLKKAIVESSTTEALQLLEEEIQNPQFDNMKFYKKRMEFIYDRQKRFVNYYKSQINKPTVPTIDDIIKSHLVSEYNRDETLLESYRTNSLRKINSNHGIDIRANSLFTEQELLNIYSQELLNRGNLAAASDIVRLLALKNFGGVYLDVDMLPGIHSDLFKTISRPSSIGLDRWEMIKLEAIMKYKKYINNYTSENFDKLDQQLKDNFKLIIESKSEKSEIFSKLENLNVSDLEIKIAFALGSVINQALISKQGSYLTNLVIEQVKNRYQFLNQHLNPAIESDNNFTDTTKIFHDSLFNSATAENSMFLTKIAPYLQVGFMPEARSTISLSGPGAYASAYYDFINLQENTIEKTLKASDLIEFKFPENNLSQLTEQEINSLWSFDQASAKYQFEKYVRDYTGGSLSEDNEVDFNKNTALDKNYLLNNKIPSNNVEEAGSKNYVHYIIQLQGDDISYEATCNLFSKNPKNSIIIQRNMNESAKSYFLSDDGESILELNKYRIPERLKNKEKVKVTFIGHGKDEFNTSEFARLSVDSLSNEISSFLDTIKLDISPKNVEVNLLGCNMFSYDFNVEETYPGKLLLSIMDKITSTLPDVNKDSITIGANQYEVRINSEGRKELLAHSGKWINKEEAIMSDLSSKEYIFFDSIDNKLKAKSKNIPGLASISEDIKTLLLDTSVSPDTKFILNNLKLNIESSVGDYIYYEKLEPVKNIIHNSIDDLIDEFNLLENVSDELYELKKLNNLDEKYLISFEDISKNNSTYSVRFINKSNGESVYVETEKEIFSKYSEHITKEISTIKNSIITDVNGNLLDNIQLDHTSQVNTLNAAFFIQSLIDYSSNKDLLNDLSTSVKVQLYAQLFSTGLNTIYDSIQLVNLISNAVNDTINVLPTITEGIPIVSTILDGINLGAAIKELLDEHDPLLKKELEAKVGVLAINMSLSIAATVASIVGIGAEVTIFLLPIAGISAGIPSLVNNELILHDKATSVVNYFNHLSESKEYGPLKTEDDKILVPIDDLVISEIDFNNNAIKLGTCNILAMEGGSGHTVTGNIDHFFSSPSISSHIPSLSIYSAIGIKTENLDFSKKIMMLPNAPSRVFWWETGAVPGLRSLENNGTKLLDSIRDLYPGKFYWRFYAFFDYAITTLKPVYEDTNIKIKLDKDTRNFIMPTITTNEIRNKLSYSFDGAGGTYSLLLSSYPISTNINLSKDDLWIFNIDNEVREISIENGTIKKGKLIKDVLSKIDINKNKLIIGNQTIDFSGDIDNKDRYIFLTCELDDKISLIIEINLVAKSYSLLLSGDKNYLISNLSNTIEKINTLGLDSKNIAYNYTDESNNKYFGAISKTSQKSIIHYKKDSKNILEFYNGSTLEFNSKDFIAEDINVFMKDDINTITGKYYVDNNTDKSIDFSISLVSKNQAKVNGLYLNESVYSSYLDFVKNADGHHNTSNFMNLFLDNISFWKLFGFENINFVVDKYFTLVGKTNLGYVEFICDNNKNIDIYFGEWKTSSSKSTIFSGNGRNVVVEPIYNPDTGEDISTSLDFSYEPLYGIDRYINKVLIAPDLYTSLININTNYYSNEYYPEIIVLNPNTFHKKVNINLDSSSFEYKWSTEGSDFILVRYLEESNKKILQKIRIKGILSNTQSFNKMSIDFKDIKKLSLVYIMSNFKSFNSENELDRDHLGFKIIDNKTYYYDEASKLVKGLININNSLFYFDPIESNLVTGWQTINGKKYYFDINTGAALTSYKIINGKHFYFNNNGVMQLGVFKGPDRFEYFAPANTQNNNIEGQAIVYQSKFLTLNGKKYYFDNDSKAVTGWRIINNEKYYFNPNNAIAAVGLQVIDNNKYYFNPDTAIISKGWQTVNGSRYYFDTDTAIAFNGYKTIDGKHFYFDSDCVVKIGVFSGSNGFEYFAPANTYNNNIEGQAIVYQSKFLTLNGKKYYFDNNSKAVTGWQTIDSKKYYFNTNTAEAATGWQTIDGKKYYFNTNTAEVATGWQTIDGKKYYFNTNTSIASTGYTIINGKHFYFNTDGIMQIGVFKGPDGFEYFAPANTDANNIEGQAILYQNKFLTLNGKKYYFASDSKAVTGWRIINNKKYYFNPNNAIAATHLYTINNDKYYFSYDGILQNGYITIERNNFYFDANNESKMVTGVFKGPNGFEYFAPANTHNNNIEGQAIVYQNKFLTLNGKKYYFDNDSKAVTGWQTIDGKKYYFNLNTAVAVTGWQTIDGKKYYFNTNTAETATGWQTIDGKKYYFNTNTSIASTGYTIINGKHFYFNTDGIMQIGVFKGPDGFEYFAPANTDANNIEGQAILYQNKFLTLNGKKYYFASDSKAVTGLRTIDGKKYYFNTNTAEAATGWQTIDGKKYYFNTNTSIASTGYTIINDKHFYFNTDGIMQIGVFKGPDGFEYFAPANTDANNIEGQAIRYQNRFLYLHDNIYYFGNNSKAATGWVTIDGRRYYFEPNTAIGANGYKIIDNKNFYFRNGLPQIGVFKGPNGFEYFAPANTDANNIDGQAIRYQNRFLHLLGNIYYFGNNSKAVTGWQTINGNMYYFMPDTAMAAAGGLFEIDGVIYFFGVDGVKAPGIYG

SEQ ID NO: 94 - protein, 2710 aa, Clostridium difficile; identical to SEQ ID NO: 92

SEQ ID NO: 95 - protein, 2710 aa, Clostridium difficile
MSLISKEELIKLAYSIRPRENEYKTILTNLDEYNKLTTNNNENKYLQLKKLNESIDVFMNKYKNSSRNRALSNLKKDILKEVILIKNSNTSPVEKNLHFVWIGGEVSDIALEYIKQWADINAEYNIKLWYDSEAFLVNTLKKAIVESSTTEALQLLEEEIQNPQFDNMKFYKKRMEFIYDRQKRFVNYYKSQINKPTVPTIDDIIKSHLVSEYNRDETLLESYRTNSLRKINSNHGIDIRANSLFTEQELLNIYSQELLNRGNLAAASDIVRLLALKNFGGVYLDVDMLPGIHSDLFKTISRPSSIGLDRWEMIKLEAIMKYKKYINNYTSENFDKLDQQLKDNFKLIIESKSEKSEIFSKLENLNVSDLEIKIAFALGSVINQALISKQGSYLTNLVIEQVKNRYQFLNQHLNPAIESDNNFTDTTKIFHDSLFNSATAENSMFLTKIAPYLQVGFMPEARSTISLSGPGAYASAYYDFINLQENTIEKTLKASDLIEFKFPENNLSQLTEQEINSLWSFDQASAKYQFEKYVRDYTGGSLSEDNEVDFNKNTALDKNYLLNNKIPSNNVEEAGSKNYVHYIIQLQGDDISYEATCNLFSKNPKNSIIIQRNMNESAKSYFLSDDGESILELNKYRIPERLKNKEKVKVTFIGHGKDEFNTSEFARLSVDSLSNEISSFLDTIKLDISPKNVEVNLLGCNMFSYDFNVEETYPGKLLLSIMDKITSTLPDVNKDSITIGANQYEVRINSEGRKELLAHSGKWINKEEAIMSDLSSKEYIFFDSIDNKLKAKSKNIPGLASISEDIKTLLLDTSVSPDTKFILNNLKLNIESSVGDYIYYEKLEPVKNIIHNSIDDLIDEFNLLENVSDELYELKKLNNLDEKYLISFEDISKNNSTYSVRFINKSNGESVYVETEKEIFSKYSEHITKEISTIKNSIITDVNGNLLDNIQLDHTSQVNTLNAAFFIQSLIDYSSNKDLLNDLSTSVKVQLYAQLFSTGLNTIYDSIQLVNLISNAVNDTINVLPTITEGIPIVSTILDGINLGAAIKELLDEHDPLLKKELEAKVGVLAINMSLSIAATVASIVGIGAEVTIFLLPIAGISAGIPSLVNNELILHDKATSVVNYFNHLSESKEYGPLKTEDDKILVPIDDLVISEIDFNNNAIKLGTCNILAMEGGSGHTVTGNIDHFFSSPSISSHIPSLSIYSAIGIKTENLDFSKKIMMLPNAPSRVFWWETGAVPGLRSLENNGTKLLDSIRDLYPGKFYWRFYAFFDYAITTLKPVYEDTNIKIKLDKDTRNFIMPTITTNEIRNKLSYSFDGAGGTYSLLLSSYPISTNINLSKDDLWIFNIDNEVREISIENGTIKKGKLIKDVLSKIDINKNKLIIGNQTIDFSGDIDNKDRYIFLTCELDDKISLIIEINLVAKSYSLLLSGDKNYLISNLSNTIEKINTLGLDSKNIAYNYTDESNNKYFGAISKTSQKSIIHYKKDSKNILEFYNGSTLEFNSKDFIAEDINVFMKDDINTITGKYYVDNNTDKSIDFSISLVSKNQAKVNGLYLNESVYSSYLDFVKNADGHHNTSNFMNLFLDNISFWKLFGFENINFVVDKYFTLVGKTNLGYVEFICDNNKNIDIYFGEWKTSSSKSTIFSGNGRNVVVEPIYNPDTGEDISTSLDFSYEPLYGIDRYINKVLIAPDLYTSLININTNYYSNEYYPEIIVLNPNTFHKKVNINLDSSSFEYKWSTEGSDFILVRYLEESNKKILQKIRIKGILSNTQSFNKMSIDFKDIKKLSLVYIMSNFKSFNSENELDRDHLGFKIIDNKTYYYDEASKLVKGLININNSLFYFDPIESNLVTGWQTINGKKYYFDINTGAALTSYKIINGKHFYFNNNGVMQLGVFKGPDRFEYFAPANTQNNNIEGQAIVYQSKFLTLNGKKYYFDNDSKAVTGWRIINNEKYYFNPNNAIAAVGLQVIDNNKYYFNPDTAIISKGWQTVNGSRYYFDTDTAIAFNGYKTIDGKHFYFDSDCVVKIGVFSGSNGFEYFAPANTYNNNIEGQAIVYQSKFLTLNGKKYYFDNNSKAVTGWQTIDSKKYYFNTNTAEAATGWQTIDGKKYYFNTNTAEVATGWQTIDGKKYYFNTNTSIASTGYTIINGKHFYFNTDGIMQIGVFKGPDGFEYFAPANTDANNIEGQAILYQNKFLTLNGKKYYFASDSKAVTGWRIINNKKYYFNPNNAIAATHLYTINNDKYYFSYDGILQNGYITIERNNFYFDANNESKMVTGVFKGPNGFEYFAPANTHNNNIEGQAIVYQNKFLTLNGKKYYFDNDSKAVTGWQTIDGKKYYFNLNTAVAVTGWQTIDGKKYYFNTNTAEAATGWQTIDGKKYYFNTNTSIASTGYTIINGKHFYFNTDGIMQIGVFKGPDGFEYFAPANTDANNIEGQAILYQNKFLTLNGKKYYFASDSKAVTGLRTIDGKKYYFNTNTAEAATGWQTIDGKKYYFNTNTSIASTGYTIINDKHFYFNTDGIMQIGVFKGPDGFEYFAPANTDANNIEGQAIRYQNRFLYLHDNIYYFGNNSKAATGWVTIDGRRYYFEPNTAIGANGYKIIDNKNFYFRNGLPQIGVFKGPNGFEYFAPANTDANNIDGQAIRYQNRFLHLLGNIYYFGNNSKAVTGWQTINGNMYYFMPDTAMAAAGGLFEIDGVIYFFGVDGVKAPGIYG

SEQ ID NO: 96 - protein, 2710 aa, Clostridium difficile; identical to SEQ ID NO: 15

SEQ ID NO: 97 - protein, 2710 aa, Clostridium difficile
MSLISKEELIKLAYSIRPRENEYKTILTNLDEYNKLTTNNNENKYLQLKKLNESIDVFMNKYKTSSRNRALSNLKKDILKEVILIKNSNTSPVEKNLHFVWIGGEVSDIALEYIKQWADINAEYNIKLWYDSEAFLVNTLKKAIVESSTTEALQLLEEEIQNPQFDNMKFYKKRMEFIYDRQKRFINYYKSQINKPTVPTIDDIIKSHLVSEYNRDETVLESYRTNSLRKINSNHGIDIRANSLFTEQELLNIYSQELLNRGNLAAASDIVRLLALKNFGGVYLDVDMLPGIHSDLFKTISRPSSIGLDRWEMIKLEAIMKYKKYINNYTSENFDKLDQQLKDNFKLIIESKSEKSEIFSKLENLNVSDLEIKIAFALGSVINQALISKQGSYLTNLVIEQVKNRYQFLNQHLNPAIESDNNFTDTTKIFHDSLFNSATAENSMFLTKIAPYLQVGFMPEARSTISLSGPGAYASAYYDFINLQENTIEKTLKASDLIEFKFPENNLSQLTEQEINSLWSFDQASAKYQFEKYVRDYTGGSLSEDNGVDFNKNTALDKNYLLNNKIPSNNVEEAGSKNYVHYIIQLQGDDISYEATCNLFSKNPKNSIIIQRNMNESAKSYFLSDDGESILELNKYRIPERLKNKEKVKVTFIGHGKDEFNTSEFARLSVDSLSNEISSFLDTIKLDISPKNVEVNLLGCNMFSYDFNVEETYPGKLLLSIMDKITSTLPDVNKNSITIGANQYEVRINSEGRKELLAHSGKWINKEEAIMSDLSSKEYIFFDSIDNKLKAKSKNIPGLASISEDIKTLLLDASVSPDTKFILNNLKLNIESSIGDYIYYEKLEPVKNIIHNSIDDLIDEFNLLENVSDELYELKKLNNLDEKYLISFEDISKNNSTYSVRFINKSNGESVYVETEKEIFSKYSEHITKEISTIKNSIITDVNGNLLDNIQLDHTSQVNTLNAAFFIQSLIDYSSNKDVLNDLSTSVKVQLYAQLFSTGLNTIYDSIQLVNLISNAVNDTINVLPTITEGIPIVSTILDGINLGAAIKELLDEHDPLLKKELEAKVGVLAINMSLSIAATVASIVGIGAEVTIFLLPIAGISAGIPSLVNNELILHDKATSVVNYFNHLSESKKYGPLKTEDDKILVPIDDLVISEIDFNNNSIKLGTCNILAMEGGSGHTVTGNIDHFFSSPSISSHIPSLSIYSAIGIETENLDFSKKIMMLPNAPSRVFWWETGAVPGLRSLENNGTKLLDSIRDLYPGKFYWRFYAFFDYAITTLKPVYEDTNIKIKLDKDTRNFIMPTITTNEIRNKLSYSFDGAGGTYSLLLSSYPISTNINLSKDDLWIFNIDNEVREISIENGTIKKGKLIKDVLSKIDINKNKLIIGNQTIDFSGDIDNKDRYIFLTCELDDKISLIIEINLVAKSYSLLLSGDKNYLISNLSNTIEKINTLGLDSKNIAYNYTDESNNKYFGAISKTSQKSIIHYKKDSKNILEFYNGSTLEFNSKDFIAEDINVFMKDDINTITGKYYVDNNTDKSIDFSISLVSKNQVKVNGLYLNESVYSSYLDFVKNSDGHHNTSNFMNLFLDNISFWKLFGFENINFVIDKYFTLVGKTNLGYVEFICDNNKNIDIYFGEWKTSSSKSTIFSGNGRNVVVEPIYNPDTGEDISTSLDFSYEPLYGIDRYINKVLIAPDLYTSLININTNYYSNEYYPEIIVLNPNTFHKKVNINLDSSSFEYKWSTEGSDFILVRYLEESNKKILQKIRIKGILSNTQSFNKMSIDFKDIKKLSLGYIMSNFKSFNSENELDRDHLGFKIIDNKTYYYDEDSKLVKGLININNSLFYFDPIEFNLVTGWQTINGKKYYFDINTGAALTSYKIINGKHFYFNNDGVMQLGVFKGPDGFEYFAPANTQNNNIEGQAIVYQSKFLTLNGKKYYFDNDSKAVTGWRIINNEKYYFNPNNAIAAVGLQVIDNNKYYFNPDTAIISKGWQTVNGSRYYFDTDTAIAFNGYKTIDGKHFYFDSDCVVKIGVFSTSNGFEYFAPANTYNNNIEGQAIVYQSKFLTLNGKKYYFDDNSKAVTGWQTIDSKKYYFNTNTAEAATGWQTIDGKKYYFNTNTAEAATGWQTIDGKKYYFNTNTAIASTGYTIINGKHFYFNTDGIMQIGVFKGPNGFEYFAPANTDANNIEGQAILYQNEFLTLNGKKYYFGSDSKAVTGWRIINNKKYYFNPNNAIAAIHLCTINNDKYYFSYDGILQNGYITIERNNFYFDANNESKMVTGVFKGPNGFEYFAPANTYNNNIEGQAIVYQNKFLTLNGKKYYFDNDSKAVTGWQTIDGKKYYFNLNTAEAATGWQTIDGKKYYFNLNTAEAATGWQTIDGKKYYFNTNTFIASTGYTSINGKHFYFNTDGIMQIGVFKGPNGFEYFAPANTHNNNIEGQAILYQNKFLTLNGKKYYFGSDSKAVTGLRTIDGKKYYFNTNTAVAVTGWQTINGKKYYFNTNTSIASTGYTIISGKHFYFNTDGIMQIGVFKGPDGFEYFAPANTDANNIEGQAIRYQNRFLYLHDNIYYFGNNSKAATGWVTIDGNRYYFEPNTAMGANGYKTIDNKNFYFRNGLPQIGVFKGSNGFEYFAPANTDANNIEGQAIRYQNRFLHLLGKIYYFGNNSKAVTGWQTINGKVYYFMPDTAMAAAGGLFEIDGVIYFFGVDGVKAPGIYG

SEQ ID NO: 98 - protein, 2710 aa, Clostridium difficile
MSLISKEELIKLAYSIRPRENEYKTILTNLDEYNKLTTNNNENKYLQLKKLNESIDVFMNKYKTSSRNRALSNLKKDILKEVILIKNSNTSPVEKNLHFVWIGGEVSDIALEYIKQWADINAEYNIKLWYDSEAFLVNTLKKAIVESSTTEALQLLEEEIQNPQFDNMKFYKKRMEFIYDRQKRFINYYKSQINKPTVPTIDDIIKSHLVSEYNRDETVLESYRTNSLRKINSNHGIDIRANSLFTEQELLNIYSQELLNRGNLAAASDIVRLLALKNFGGVYLDVDMLPGIHSDLFKTISRPSSIGLDRWEMIKLEAIMKYKKYINNYTSENFDKLDQQLKDNFKLIIESKSEKSEIFSKLENLNVSDLEIKIAFALGSVINQALISKQGSYLTNLVIEQVKNRYQFLNQHLNPAIESDNNFTDTTKIFHDSLFNSATAENSMFLTKIAPYLQVGFMPEARSTISLSGPGAYASAYYDFINLQENTIEKTLKASDLIEFKFPENNLSQLTEQEINSLWSFDQASAKYQFEKYVRDYTGGSLSEDNGVDFNKNTALDKNYLLNNKIPSNNVEEAGSKNYVHYIIQLQGDDISYEATCNLFSKNPKNSIIIQRNMNESAKSYFLSDDGESILELNKYRIPERLKNKEKVKVTFIGHGKDEFNTSEFARLSVDSLSNEISSFLDTIKLDISPKNVEVNLLGCNMFSYDFNVEETYPGKLLLSIMDKITSTLPDVNKNSITIGANQYEVRINSEGRKELLAHSGKWINKEEAIMSDLSSKEYIFFDSIDNKLKAKSKNIPGLASISEDIKTLLLDASVSPDTKFILNNLKLNIESSIGDYIYYEKLEPVKNIIHNSIDDLIDEFNLLENVSDELYELKKLNNLDEKYLISFEDISKNNSTYSVRFINKSNGESVYVETEKEIFSKYSEHITKEISTIKNSIITDVNGNLLDNIQLDHTSQVNTLNAAFFIQSLIDYSSNKDVLNDLSTSVKVQLYAQLFSTGLNTIYDSIQLVNLISNAVNDTINVLPTITEGIPIVSTILDGINLGAAIKELLDEHDPLLKKELEAKVGVLAINMSLSIAATVASIVGIGAEVTIFLLPIAGISAGIPSLVNNELILHDKATSVVNYFNHLSESKKYGPLKTEDDKILVPIDDLVISEIDFNNNSIKLGTCNILAMEGGSGHTVTGNIDHFFSSPSISSHIPSLSIYSAIGIETENLDFSKKIMMLPNAPSRVFWWETGAVPGLRSLENDGTRLLDSIRDLYPGKFYWRFYAFFDYAITTLKPVYEDTNIKIKLDKDTRNFIMPTITTNEIRNKLSYSFDGAGGTYSLLLSSYPISTNINLSKDDLWIFNIDNEVREISIENGTIKKGKLIKDVLSKIDINKNKLIIGNQTIDFSGDIDNKDRYIFLTCELDDKISLIIEINLVAKSYSLLLSGDKNYLISNLSNTIEKINTLGLDSKNIAYNYTDESNNKYFGAISKTSQKSIIHYKKDSKNILEFYNDSTLEFNSKDFIAEDINVFMKDDINTITGKYYVDNNTDKSIDFSISLVSKNQVKVNGLYLNESVYSSYLDFVKNSDGHHNTSNFMNLFLDNISFWKLFGFENINFVIDKYFTLVGKTNLGYVEFICDNNKNIDIYFGEWKTSSSKSTIFSGNGRNVVVEPIYNPDTGEDISTSLDFSYEPLYGIDRYINKVLIAPDLYTSLININTNYYSNEYYPEIIVLNPNTFHKKVNINLDSSSFEYKWSTEGSDFILVRYLEESNKKILQKIRIKGILSNTQSFNKMSIDFKDIKKLSLGYIMSNFKSFNSENELDRDHLGFKIIDNKTYYYDEDSKLVKGLININNSLFYFDPIEFNLVTGWQTINGKKYYFDINTGAALTSYKIINGKHFYFNNDGVMQLGVFKGPDGFEYFAPANTQNNNIEGQAIVYQSKFLTLNGKKYYFDNNSKAVTGWRIINNEKYYFNPNNAIAAVGLQVIDNNKYYFNPDTAIISKGWQTVNGSRYYFDTDTAIAFNGYKTIDGKHFYFDSDCVVKIGVFSTSNGFEYFAPANTYNNNIEGQAIVYQSKFLTLNGKKYYFDNNSKAVTGWQTIDSKKYYFNTNTAEAATGWQTIDGKKYYFNTNTAEAATGWQTIDGKKYYFNTNTAIASTGYTIINGKHFYFNTDGIMQIGVFKGPNGFEYFAPANTDANNIEGQAILYQNEFLTLNGKKYYFGSDSKAVTGWRIINNKKYYFNPNNAIAAIHLCTINNDKYYFSYDGILQNGYITIERNNFYFDANNESKMVTGVFKGPNGFEYFAPANTHNNNIEGQAIVYQNKFLTLNGKKYYFDNDSKAVTGWQTIDGKKYYFNLNTAEAATGWQTIDGKKYYFNLNTAEAATGWQTIDGKKYYFNTNTFIASTGYTSINGKHFYFNTDGIMQIGVFKGPNGFEYFAPANTHNNNIEGQAILYQNKFLTLNGKKYYFGSDSKAVTGLRTIDGKKYYFNTNTAVAVTGWQTINGKKYYFNTNTSIASTGYTIISGKHFYFNTDGIMQIGVFKGPDGFEYFAPANTDANNIEGQAIRYQNRFLYLHDNIYYFGNNSKAATGWVTIDGNRYYFEPNTAMGANGYKTIDNKNFYFRNGLPQIGVFKGSNGFEYFAPANTDANNIEGQAIRYQNRFLHLLGKIYYFGNNSKAVTGWQTINGKVYYFMPDTAMAAAGGLFEIDGVIYFFGVDGVKAPGIYG

SEQ ID NO: 99 - protein, 2710 aa, Clostridium difficile; identical to SEQ ID NO: 95

SEQ ID NO: 100 - protein, 2710 aa, Clostridium difficile
MSLISKEELIKLAYSIRPRENEYKTILTNLDEYNKLTTNNNENKYLQLKKLNESIDVFMNKYKTSSRNRALSNLKKDILKEVILIKNSNTSPVEKNLHFVWIGGEVSDIALEYIKQWADINAEYNIKLWYDSEAFLVNTLKKAIVESSTTEALQLLEEEIQNPQFDNMKFYKKRMEFIYDRQKRFINYYKSQINKPTVPTIDDIIKSHLVSEYNRDETVLESYRTNSLRKINSNHGIDIRANSLFTEQELLNIYSQELLNRGNLAAASDIVRLLALKNFGGVYLDVDMLPGIHSDLFKTISRPSSIGLDRWEMIKLEAIMKYKKYINNYTSENFDKLDQQLKDNFKLIIESKSEKSEIFSKLENLNVSDLEIKIAFALGSVINQALISKQGSYLTNLVIEQVKNRYQFLNQHLNPAIESDNNFTDTTKIFHDSLFNSATAENSMFLTKIAPYLQVGFMPEARSTISLSGPGAYASAYYDFINLQENTIEKTLKASDLIEFKFPENNLSQLTEQEINSLWSFDQASAKYQFEKYVRDYTGGSLSEDNGVDFNKNTALDKNYLLNNKIPSNNVEEAGSKNYVHYIIQLQGDDISYEATCNLFSKNPKNSIIIQRNMNESAKSYFLSDDGESILELNKYRIPERLKNKEKVKVTFIGHGKDEFNTSEFARLSVDSLSNEISSFLDTIKLDISPKNVEVNLLGCNMFSYDFNVEETYPGKLLLSIMDKITSTLPDVNKNSITIGANQYEVRINSEGRKELLAHSGKWINKEEAIMSDLSSKEYIFFDSIDNKLKAKSKNIPGLASISEDIKTLLLDASVSPDTKFILNNLKLNIESSIGDYIYYEKLEPVKNIIHNSIDDLIDEFNLLENVSDELYELKKLNNLDEKYLISFEDISKNNSTYSVRFINKSNGESVYVETEKEIFSKYSEHITKEISTIKNSIITDVNGNLLDNIQLDHTSQVNTLNAAFFIQSLIDYSSNKDVLNDLSTSVKVQLYAQLFSTGLNTIYDSIQLVNLISNAVNDTINVLPTITEGIPIVSTILDGINLGAAIKELLDEHDPLLKKELEAKVGVLAINMSLSIAATVASIVGIGAEVTIFLLPIAGISAGIPSLVNNELILHDKATSVVNYFNHLSESKKYGPLKTEDDKILVPIDDLVISEIDFNNNSIKLGTCNILAMEGGSGHTVTGNIDHFFSSPSISSHIPSLSIYSAIGIETENLDFSKKIMMLPNAPSRVFWWETGAVPGLRSLENDGTRLLDSIRDLYPGKFYWRFYAFFDYAITTLKPVYEDTNIKIKLDKDTRNFIMPTITTNEIRNKLSYSFDGAGGTYSLLLSSYPISTNINLSKDDLWIFNIDNEVREISIENGTIKKGKLIKDVLSKIDINKNKLIIGNQTIDFSGDIDNKDRYIFLTCELDDKISLIIEINLVAKSYSLLLSGDKNYLISNLSNTIEKINTLGLDSKNIAYNYTDESNNKYFGAISKTSQKSIIHYKKDSKNILEFYNDSTLEFNSKDFIAEDINVFMKDDINTITGKYYVDNNTDKSIDFSISLVSKNQVKVNGLYLNESVYSSYLDFVKNSDGHHNTSNFMNLFLDNISFWKLFGFENINFVIDKYFTLVGKTNLGYVEFICDNNKNIDIYFGEWKTSSSKSTIFSGNGRNVVVEPIYNPDTGEDISTSLDFSYEPLYGIDRYINKVLIAPDLYTSLININTNYYSNEYYPEIIVLNPNTFHKKVNINLDSSSFEYKWSTEGSDFILVRYLEESNKKILQKIRIKGILSNTQSFNKMSIDFKDIKKLSLGYIMSNFKSFNSENELDRDHLGFKIIDNKTYYYDEDSKLVKGLININNSLFYFDPIEFNLVTGWQTINGKKYYFDINTGAALTSYKIINGKHFYFNNDGVMQLGVFKGPDGFEYFAPANTQNNNIEGQAIVYQSKFLTLNGKKYYFDNDSKAVTGWRIINNEKYYFNPNNAIAAVGLQVIDNNKYYFNPDTAIISKGWQTVNGSRYYFDTDTAIAFNGYKTIDGKHFYFDSDCVVKIGVFSTSNGFEYFAPANTYNNNIEGQAIVYQSKFLTLNGKKYYFDNNSKAVTGWQTIDSKKYYFNTNTAEAATGWQTIDGKKYYFNTNTAEAATGWQTIDGKKYYFNTNTAIASTGYTIINGKHFYFNTDGIMKIGVFKGPNGFEYFAPANTDANNIEGQAILYQNEFLTLNGKKYYFGSDSKAVTGWRIINNKKYYFNPNNAIAAIHLCTINNDKYYFSYDGILQNGYITIERNNFYFDANNESKMVTGVFKGPNGFEYFAPANTYNNNIEGQAIVYQNKFLTLNGKKYYFDNDSKAVTGWQTIDGKKYYFNLNTAEAATGWQTIDGKKYYFNLNTAEAATGWQTIDGKKYYFNTNTFIASTGYTSINGKHFYFNTDGIMQIGVFKGPNGFEYFAPANTHNNNIEGQAILYQNKFLTLNGKKYYFGSDSKAVTGLRTIDGKKYYFNTNTAVAVTGWQTINGKKYYFNTNTSIASTGYTIISGKHFYFNTDGIMQIGVFKGPDGFEYFAPANTDANNIEGQAIRYQNRFLYLHDNIYYFGNNSKAATGWVTIDGNRYYFEPNTAMGANGYKTIDNKNFYFRNGLPQIGVFKGSNGFEYFAPANTDANNIEGQAIRYQNRFLHLLGKIYYFGNNSKAVTGWQTINGKVYYFMPDTAMAAAGGLFEIDGVIYFFGVDGVKAPGIYG

SEQ ID NO: 101 - protein, 2710 aa, Clostridium difficile; identical to SEQ ID NO: 95

SEQ ID NO: 102 - protein, 2710 aa, Clostridium difficile
MSLISKEELIKLAYSIRPRENEYKTILTNLDEYNKLTTNNNENKYLQLKKLNESIDVFMNKYKNSSRNRALSNLKKDILKEVILIKNSNTSPVEKNLHFVWIGGEVSDIALEYIKQWADINAEYNIKLWYDSEAFLVNTLKKAIVESSTTEALQLLEEEIQNPQFDNTKFYKKRMEFIYDRQKRFINYYKSQINKPTVPTIDDIIKSHLVSEYNRDETLLESYRTNSLRKINSNHGIDIRANSLFTEQELLNIYSQELLNRGNLAAASDIVRLLALKNFGGVYLDVDMLPGIHSDLFKTISRPSSIGLDRWEMIKLEAIMKYKKYINNYTSENFDKLDQQLKDNFKLIIESKSEKSEIFSKLENLNVSDLEIKIAFALGSVINQALISKQGSYLTNLVIEQVKNRYQFLNQHLNPAIESDNNFTDTTKIFHDSLFNSATAENSMFLTKIAPYLQVGFMPEARSTISLSGPGAYASAYYDFINLQENTIEKTLKASDLIEFKFPENNLSQLTEQEINSLWSFDQASAKYQFEKYVRDYTGGSLSEDNGVDFNKNTALDKNYLLNNKIPSNNVEEAGSKNYVHYIIQLQGDDISYEATCNLFSKNPKNSIIIQRNMNESAKSYFLSDDGESILELNKYRIPERLKNKEKVKVTFIGHGKDEFNTSEFARLSVDSLSNEISSFLDTIKLDISPKNVEVNLLGCNMFSYDFNVEETYPGKLLLSIMDKITSTLPDVNKDSITIGANQYEVRINSEGRKELLAHSGKWINKEEAIMSDLSSKEYIFFDSIDNKLKAKSKNIPGLASISEDIKTLLLDASVSPDTKFILNNLKLNIESSIGDYIYYEKLEPVKNIIHNSIDDLIDEFNLLENVSDELYELKKLNNLDEKYLISFEDISKNNSTYSVRFINKSNGESVYVETEKEIFSKYSEHITKEISTIKNSIITDVNGNLLDNIQLDHTSQVNTLNAAFFIQSLIDYSSNKDVLNDLSTSVKVQLYAQLFSTGLNTIYDSIQLVNLISNAVNDTINVLPTITEGIPIVSTILDGINLGAAIKELLDEHDPLLKKELEAKVGVLAINMSLSIAATVASIVGIGAEVTIFLLPIAGISAGIPSLVNNELILHDKATSVVNYFNHLSESKKYGPLKTEDDKILVPIDDLVISEIDFNNNSIKLGTCNILAMEGGSGHTVTGNIDHFFSSPYISSHIPSLSVYSAIGIKTENLDFSKKIMMLPNAPSRVFWWETGAVPGLRSLENDGTKLLDSIRDLYPGKFYWRFYAFFDYAITTLKPVYEDTNTKIKLDKDTRNFIMPTITTDEIRNKLSYSFDGAGGTYSLLLSSYPISMNINLSKDDLWIFNIDNEVREISIENGTIKKGNLIEDVLSKIDINKNKLIIGNQTIDFSGDIDNKDRYIFLTCELDDKISLIIEINLVAKSYSLLLSGDKNYLISNLSNTIEKINTLGLDSKNIAYNYTDESNNKYFGAISKTSQKSIIHYKKDSKNILEFYNGSTLEFNSKDFIAEDINVFMKDDINTITGKYYVDNNTDKSIDFSISLVSKNQVKVNGLYLNESVYSSYLDFVKNSDGHHNTSNFMNLFLNNISFWKLFGFENINFVIDKYFTLVGKTNLGYVEFICDNNKNIDIYFGEWKTLSSKSTIFSGNGRNVVVEPIYNPDTGEDISTSLDFSYEPLYGIDRYINKVLIAPDLYTSLININTNYYSNEYYPEIIVLNPNTFHKKVNINLDSSSFEYKWSTEGSDFILVRYLEESNKKILQKIRIKGILSNTQSFNKMSIDFKDIKKLSLGYIMSNFKSFNSENELDRDHLGFKIIDNKTYYYDEDSKLVKGLININNSLFYFDPIESNLVTGWQTINGKKYYFDINTGAASTSYKIINGKHFYFNNNGVMQLGVFKGPDGFEYFAPANTQNNNIEGQAIVYQSKFLTLNGKKYYFDNDSKAVTGWRIINNEKYYFNPNNAIAAVGLQVIDNNKYYFNPDTAIISKGWQTVNGSRYYFDTDTAIAFNGYKTIDGKHFYFDSDCVVKIGVFSGSNGFEYFAPANTYNNNIEGQAIVYQSKFLTLNGKKYYFDNNSKAVTGWQTIDSKKYYFNTNTAEAATGWQTIDGKKYYFNTNTAEAATGWQTIDGKKYYFNTNTSIASTGYTIINGKHFYFNTDGIMQIGVFKGPNGFEYFAPANTDANNIEGQAILYQNKFLTLNGKKYYFGSDSKAITGWQTIDGKKYYFNPNNAIAATHLCTINNDKYYFSYDGILQNGYITIERNNFYFDANNESKMVTGVFKGPNGFEYFAPANTHNNNIEGQAIVYQNKFLTLNGKKYYFDNDSKAVTGWQTIDSKKYYFNLNTAVAVTGWQTIDGEKYYFNLNTAEAATGWQTIDGKRYYFNTNTYIASTGYTIINGKHFYFNTDGIMQIGVFKGPDGFEYFAPANTHNNNIEGQAILYQNKFLTLNGKKYYFGSDSKAVTGLRTIDGKKYYFNTNTAVAVTGWQTINGKKYYFNTNTYIASTGYTIISGKHFYFNTDGIMQIGVFKGPDGFEYFAPANTDANNIEGQAIRYQNRFLYLHDNIYYFGNDSKAATGWATIDGNRYYFEPNTAMGANGYKTIDNKNFYFRNGLPQIGVFKGPNGFEYFAPANTDANNIDGQAIRYQNRFLHLLGNIYYFGNNSKAVTGWQTINGKVYYFMPDTAMAAAGGLFEIDGVIYFFGVDGVKAPGIYG

SEQ ID NO: 103 - protein, 2710 aa, Clostridium difficile; identical to SEQ ID NO: 102

SEQ ID NO: 104 - protein, 2710 aa, Clostridium difficile; identical to SEQ ID NO: 102

SEQ ID NO: 105 - protein, 2710 aa, Clostridium difficile; identical to SEQ ID NO: 88

SEQ ID NO: 106 - protein, 2710 aa, Clostridium difficile; identical to SEQ ID NO: 92

SEQ ID NO: 107 - protein, 2710 aa, Clostridium difficile
MSLISKEELIKLAYSIRPRENEYKTILTNLDEYNKLTTNNNENKYLQLKKLNESIDVFMNKYKTSSRNRALSNLKKDILKEVILIKNSNTSPVEKNLHFVWIGGEVSDIALEYIKQWADINAEYNIKLWYDSEAFLVNTLKKAIVESSTTEALQLLEEEIQNPQFDNMKFYKKRMEFIYDRQKRFINYYKSQINKPTVPTIDDIIKSHLVSEYNRDETVLESYRTNSLRKINSNHGIDIRANSLFTEQELLNIYSQELLNRGNLAAASDIVRLLALKNFGGVYLDVDMLPGIHSDLFKTISRPSSIGLDRWEMIKLEAIMKYKKYINNYTSENFDKLDQQLKDNFKLIIESKSEKSEIFSKLENLNVSDLEIKIAFALGSVINQALISKQGSYLTNLVIEQVKNRYQFLNQHLNPAIESDNNFTDTTKIFHDSLFNSATAENSMFLTKIAPYLQVGFMPEARSTISLSGPGAYASAYYDFINLQENTIEKTLKASDLIEFKFPENNLSQLTEQEINSLWSFDQASAKYQFEKYVRDYTGGSLSEDNGVDFNKNTALDKNYLLNNKIPSNNVEEAGSKNYVHYIIQLQGDDISYEATCNLFSKNPKNSIIIQRNMNESAKSYFLSDDGESILELNKYRIPERLKNKEKVKVTFIGHGKDEFNTSEFARLSVDSLSNEISSFLDTIKLDISPKNVEVNLLGCNMFSYDFNVEETYPGKLLLSIMDKITSTLPDVNKNSITIGANQYEVRINSEGRKELLAHSGKWINKEEAIMSDLSSKEYIFFDSIDNKLKAKSKNIPGLASISEDIKTLLLDASVSPDTKFILNNLKLNIESSIGDYIYYEKLEPVKNIIHNSIDDLIDEFNLLENVSDELYELKKLNNLDEKYLISFEDISKNNSTYSVRFINKSNGESVYVETEKEIFSKYSEHITKEISTIKNSIITDVNGNLLDNIQLDHTSQVNTLNAAFFIQSLIDYSSNKDVLNDLSTSVKVQLYAQLFSTGLNTIYDSIQLVNLISNAVNDTINVLPTITEGIPIVSTILDGINLGAAIKELLDEHDPLLKKELEAKVGVLAINMSLSIAATVASIVGIGAEVTIFLLPIAGISAGIPSLVNNELILHDKATSVVNYFNHLSESKKYGPLKTEDDKILVPIDDLVISEIDFNNNSIKLGTCNILAMEGGSGHTVTGNIDHFFSSPSISSHIPSLSIYSAIGIETENLDFSKKIMMLPNAPSRVFWWETGAVPGLRSLENDGTRLLDSIRDLYPGKFYWRFYAFFDYAITTLKPVYEDTNIKIKLDKDTRNFIMPTITTNEIRNKLSYSFDGAGGTYSLLLSSYPISTNINLSKDDLWIFNIDNEVREISIENGTIKKGKLIKDVLSKIDINKNKLIIGNQTIDFSGDIDNKDRYIFLTCELDDKISLIIEINLVAKSYSLLLSGDKNYLISNLSNTIEKINTLGLDSKNIAYNYTDESNNKYFGAISKTSQKSIIHYKKDSKNILEFYNDSTLEFNSKDFIAEDINVFMKDDINTITGKYYVDNNTDKSIDFSISLVSKNQVKVNGLYLNESVYSSYLDFVKNSDGHHNTSNFMNLFLDNISFWKLFGFENINFVIDKYFTLVGKTNLGYVEFICDNNKNIDIYFGEWKTSSSKSTIFSGNGRNVVVEPIYNPDTGEDISTSLDFSYEPLYGIDRYINKVLIAPDLYTSLININTNYYSNEYYPEIIVLNPNTFHKKVNINLDSSSFEYKWSTEGSDFILVRYLEESNKKILQKIRIKGILSNTQSFNKMSIDFKDIKKLSLGYIMSNFKSFNSENELDRDHLGFKIIDNKTYYYDEDSKLVKGLININNSLFYFDPIEFNLVTGWQTINGKKYYFDINTGAALTSYKIINGKHFYFNNDGVMQLGVFKGPDGFEYFAPANTQNNNIEGQAIVYQSKFLTLNGKKYYFDNDSKAVTGWRIINNEKYYFNPNNAIAAVGLQVIDNNKYYFNPDTAIISKGWQTVNGSRYYFDTDTAIAFNGYKTIDGKHFYFDSDCVVKIGVFSTSNGFEYFAPANTYNNNIEGQAIVYQSKFLTLNGKKYYFDNNSKAVTGWQTIDSKKYYFNTNTAEAATGWQTIDGKKYYFNTNTAEAATGWQTIDGKKYYFNTNTAIASTGYTIINGKHFYFNTDGIMQIGVFKGPNGFEYFAPANTDANNIEGQAILYQNEFLTLNGKKYYFGSDSKAVTGWRIINNKKYYFNPNNAIAAIHLCTINNDKYYFSYDGILQNGYITIERNNFYFDANNESKMVTGVFKGPNGFEYFAPANTHNNNIEGQAIVYQNKFLTLNGKKYYFDNDSKAVTGWQTIDGKKYYFNLNTAEAATGWQTIDGKKYYFNLNTAEAATGWQTIDGKKYYFNTNTFIASTGYTSINGKHFYFNTDGIMQIGVFKGPNGFEYFAPANTDANNIEGQAILYQNKFLTLNGKKYYFGSDSKAVTGLRTIDGKKYYFNTNTAVAVTGWQTINGKKYYFNTNTSIASTGYTIISGKHFYFNTDGIMQIGVFKGPDGFEYFAPANTDANNIEGQAIRYQNRFLYLHDNIYYFGNNSKAATGWVTIDGNRYYFEPNTAMGANGYKTIDNKNFYFRNGLPQIGVFKGSNGFEYFAPANTDANNIEGQAIRYQNRFLHLLGKIYYFGNNSKAVTGWQTINGKVYYFMPDTAMAAAGGLFEIDGVIYFFGVDGVKAPGIYG

SEQ ID NO: 108 - protein, 2710 aa, Clostridium difficile; identical to SEQ ID NO: 88

SEQ ID NO: 109 - protein, 2710 aa, Clostridium difficile; identical to SEQ ID NO: 15

SEQ ID NO: 110 - protein, 2366 aa, Clostridium difficile; identical to SEQ ID NO: 21

SEQ ID NO: 111 - protein, 2366 aa, Clostridium difficile
MSLVNRKQLEKMANVRFRTQEDEYVAILDALEEYHNMSENTVVEKYLKLKDINSLTDIYIDTYKKSGRNKALKKFKEYLVTEVLELKNNNLTPVEKNLHFVWIGGQINDTAINYINQWKDVNSDYNVNVFYDSNAFLINTLKKTVVESAINDTLESFRENLNDPRFDYNKFFRKRMEIIYDKQKNFINYYKAQREENPELIIDDIVKTYLSNEYSKEIDELNTYIEESLNKITQNSGNDVRNFEEFKNGESFNLYEQELVERWNLAAASDILRISALKEIGGMYLDVDMLPGIQPDLFESIEKPSSVTVDFWEMTKLEAIMKYKEYIPEYTSEHFDMLDEEVQSSFESVLASKSDKSEIFSSLGDMEASPLEVKIAFNSKGIINQGLISVKDSYCSNLIVKQIENRYKILNNSLNPAISEDNDFNTTTNTFIDSIMAEANADNGRFMMELGKYLRVGFFPDVKTTINLSGPEAYAAAYQDLLMFKEGSMNIHLIEADLRNFEISKTNISQSTEQEMASLWSFDDARAKAQFEEYKRNYFEGSLGEDDNLDFSQNIVVDKEYLLEKISSLARSSERGYIHYIVQLQGDKISYEAACNLFAKTPYDSVLFQKNIEDSEIAYYYNPGDGEIQEIDKYKIPSIISDRPKIKLTFIGHGKDEFNTDIFAGFDVDSLSTEIEAAIDLAKEDISPKSIEINLLGCNMFSYSINVEETYPGKLLLKVKDKISELMPSISQDSIIVSANQYEVRINSEGRRELLDHSGEWINKEESIIKDISSKEYISFNPKENKITVKSKNLPELSTLLQEIRNNSNSSDIELEEKVMLTECEINVISNIDTQIVEERIEEAKNLTSDSINYIKDEFKLIESISDALCDLKQQNELEDSHFISFEDISETDEGFSIRFINKETGESIFVETEKTIFSEYANHITEEISKIKGTIFDTVNGKLVKKVNLDTTHEVNTLNAAFFIQSLIEYNSSKESLSNLSVAMKVQVYAQLFSTGLNTITDAAKVVELVSTALDETIDLLPTLSEGLPIIATIIDGVSLGAAIKELSETSDPLLRQEIEAKIGIMAVNLTTATTAIITSSLGVASGFSILLVPLAGISAGIPSLVNNELVLRDKATKVVDYFKHVSLVETEGVFTLLDDKIMMPQDDLVISEIDFNNNSIVLGKCEIWRMEGGSGHTVTDDIDHFFSAPSITYREPHLSIYDVLEVQKEELDLSKDLMVLPNAPNRVFAWETGWTPGLRSLENDGTKLLDRIRDNYEGEFYWRYFAFIADALITTLKPRYEDTNIRINLDSNTRSFIVPIITTEYIREKLSYSFYGSGGTYALSLSQYNMGINIELSESDVWIIDVDNVVRDVTIESDKIKKGDLIEGILSTLSIEENKIILNSHEINFSGEVNGSNGFVSLTFSILEGINAIIEVDLLSKSYKLLISGELKILMLNSNHIQQKIDYIGFNSELQKNIPYSFVDSEGKENGFINGSTKEGLFVSELPDVVLISKVYMDDSKPSFGYYSNNLKDVKVITKDNVNILTGYYLKDDIKISLSLTLQDEKTIKLNSVHLDESGVAEILKFMNRKGNTNTSDSLMSFLESMNIKSIFVNFLQSNIKFILDANFIISGTTSIGQFEFICDENDNIQPYFIKFNTLETNYTLYVGNRQNMIVEPNYDLDDSGDISSTVINFSQKYLYGIDSCVNKVVISPNIYTDEINITPVYETNNTYPEVIVLDANYINEKINVNINDLSIRYVWSNDGNDFILMSTSEENKVSQVKIRFVNVFKDKTLANKLSFNFSDKQDVPVSEIILSFTPSYYEDGLIGYDLGLVSLYNEKFYINNFGMMVSGLIYINDSLYYFKPPVNNLITGFVTVGDDKYYFNPINGGAASIGETIIDDKNYYFNQSGVLQTGVFSTEDGFKYFAPANTLDENLEGEAIDFTGKLIIDENIYYFDDNYRGAVEWKELDGEMHYFSPETGKAFKGLNQIGDYKYYFNSDGVMQKGFVSINDNKHYFDDSGVMKVGYTEIDGKHFYFAENGEMQIGVFNTEDGFKYFAHHNEDLGNEEGEEISYSGILNFNNKIYYFDDSFTAVVGWKDLEDGSKYYFDEDTAEAYIGLSLINDGQYYFNDDGIMQVGFVTINDKVFYFSDSGIIESGVQNIDDNYFYIDDNGIVQIGVFDTSDGYKYFAPANTVNDNIYGQAVEYSGLVRVGEDVYYFGETYTIETGWIYDMENESDKYYFNPETKKACKGINLIDDIKYYFDEKGIMRTGLISFENNNYYFNENGEMQFGYINIEDKMFYFGEDGVMQIGVFNTPDGFKYFAHQNTLDENFEGESINYTGWLDLDEKRYYFTDEYIAATGSVIIDGEEYYFDPDTAQLVISE

SEQ ID NO: 112 - protein, 2366 aa, Clostridium difficile; identical to SEQ ID NO: 21

SEQ ID NO: 113 - protein, 2366 aa, Clostridium difficile; identical to SEQ ID NO: 111

SEQ ID NO: 114 - protein, 2366 aa, Clostridium difficile
MSLVNRKQLEKMANVRFRTQEDEYVAILDALEEYHNMSENTVVEKYLKLKDINSLTDIYIDTYKKSGRNKALKKFKEYLVTEVLELKNNNLTPVEKNLHFVWIGGQINDTAINYINQWKDVNSDYNVNVFYDSNAFLINTLKKTVVESAINDTLESFRENLNDPRFDYNKFFRKRMEIIYDKQKNFINYYKAQREENPELIIDDIVKTYLSNEYSKEIDELNTYIEESLNKITQNSGNDVRNFEEFKNGESFNLYEQELVERWNLAAASDILRISALKEIGGMYLDVDMLPGIQPDLFESIEKPSSVTVDFWEMTKLEAIMKYKEYIPEYTSEHFDMLDEEVQSSFESVLASKSDKSEIFSSLGDMEASPLEVKIAFNSKGIINQGLISVKDSYCSNLIVKQIENRYKILNNSLNPAISEDNDFNTTTNTFIDSIMAEANADNGRFMMELGKYLRVGFFPDVKTTINLSGPEAYAAAYQDLLMFKEGSMNIHLIEADLRNFEISKTNISQSTEQEMASLWSFDDARAKAQFEEYKRNYFEGSLGEDDNLDFSQNIVVDKEYLLEKISSLARSSERGYIHYIVQLQGDKISYEAACNLFAKTPYDSVLFQKNIEDSEIAYYYNPGDGEIQEIDKYKIPSIISDRPKIKLTFIGHGKDEFNTDIFAGFDVDSLSTEIEAAIDLAKEDISPKSIEINLLGCNMFSYSINVEETYPGKLLLKVKDKISELMPSISQDSIIVSANQYEVRINSEGRRELLDHSGEWINKEESIIKDISSKEYISFNPKENKITVKSKNLPELSTLLQEIRNNSNSSDIELEEKVMLTECEINVISNIDTQIVEERIEEAKNLTSDSINYIKDEFKLIESISDALCDLKQQNELEDSHFISFEDISETDEGFSIRFINKETGESIFVETEKTIFSEYANHITEEISKIKGTIFDTVNGKLVKKVNLDTTHEVNTLNAAFFIQSLIEYNSSKESLSNLSVAMKVQVYAQLFSTGLNTITDAAKVVELVSTALDETIDLLPTLSEGLPIIATIIDGVSLGAAIKELSETSDPLLRQEIEAKIGIMAVNLTTATTAIITSSLGIASGFSILLVPLAGISAGIPSLVNNELVLRDKATKVVDYFKHVSLVETEGVFTLLDDKIMMPQDDLVISEIDFNNNSIVLGKCEIWRMEGGSGHTVTDDIDHFFSAPSITYREPHLSIYDVLEVQKEELDLSKDLMVLPNAPNRVFAWETGWTPGLRSLENDGTKLLDRIRDNYEGEFYWRYFAFIADALITTLKPRYEDTNIRINLDSNTRSFIVPIITTEYIREKLSYSFYGSGGTYALSLSQYNMGINIELSESDVWIIDVDNVVRDVTIESDKIKKGDLIEGILSTLSIEENKIILNSHEINFSGEVNGSNGFVSLTFSILEGINAIIEVDLLSKSYKLLISGELKILMLNSNHIQQKIDYIGFNSELQKNIPYRFVDSEGKENGFINGSTKEGLFVSELPDVVLISKVYMDDSKPSFGYYSNNLKDVKVITKDNVNILTGYYLKDDIKISLSLTLQDEKTIKLNSVHLDESGVAEILKFMNRKGNTNTSDSLMSFLESMNIKSIFVNFLQSNIKFILDANFIISGTTSIGQFEFICDENDNIQPYFIKFNTLETNYTLYVGNRQNMIVEPNYDLDDSGDISSTVINFSQKYLYGIDSCVNKVVISPNIYTDEINITPVYETNNTYPEVIVLDANYINEKINVNINDLSIRYVWSNDGNDFILMSTSEENKVSQVKIRFVNVFKDKTLANKLSFNFSDKQDVPVSEIILSFTPSYYEDGLIGYDLGLVSLYNEKFYINNFGMMVSGLIYINDSLYYFKPPVNNLITGFVTVGDDKYYFNPINGGAASIGETIIDDKNYYFNQSGVLQTGVFSTEDGFKYFAPANTLDENLEGEAIDFTGKLIIDENIYYFDDNYRGAVEWKELDGEMHYFSPETGKAFKGLNQIGDDKYYFNSDGVMQKGFVSINDNKHYFDDSGVMKVGYTEIDGKHFYFAENGEMQIGVFNTEDGFKYFAHHNEDLGNEEGEEISYSGILNFNNKIYYFDDSFTAVVGWKDLEDGSKYYFDEDTAEAYIGLSLINDGQYYFNDDGIMQVGFVTINDKVFYFSDSGIIESGVQNIDDNYFYIDDNGIVQIGVFDTSDGYKYFAPANTVNDNIYGQAVEYSGLVRVGEDVYYFGETYTIETGWIYDMENESDKYYFNPETKKACKGINLIDDIKYYFDEKGIMRTGLISFENNNYYFNENGEMQFGYINIEDKMFYFGEDGVMQIGVFNTPDGFKYFAHQNTLDENFEGESINYTGWLDLDEKRYYFTDEYIAATGSVIIDGEEYYFDPDTAQLVISE

SEQ ID NO: 115 - protein, 2366 aa, Clostridium difficile
MSLVNRKQLEKMANVRFRTQEDEYVAILDALEEYHNMSENTVVEKYLKLKDINSLTDIYIDTYKKSGRNKALKKFKEYLVTEVLELKNNNLTPVEKNLHFVWIGGQINDTAINYINQWKDVNSDYNVNVFYDSNAFLINTLKKTVVESAINDTLESFRENLNDPRFDYNKFFRKRMEIIYDKQKNFINYYKAQREENPELIIDDIVKTYLSNEYSKEIDELNTYIEESLNKITQNSGNDVRNFEEFKNGESFNLYEQELVERWNLAAASDILRISALKEIGGMYLDVDMLPGIQPDLFESIEKPSSVTVDFWEMTKLEAIMKYKEYIPEYTSEHFDMLDEEVQSSFESVLASKSDKSEIFSSLGDMEASPLEVKIAFNSKGIINQGLISVKDSYCSNLIVKQIENRYKILNNSLNPAISEDNDFNTTTNTFIDSIMAEANADNGRFMMELGKYLRVGFFPDVKTTINLSGPEAYAAAYQDLLMFKEGSMNIHLIEADLRNFEISKTNISQSTEQEMASLWSFDDARAKAQFEEYKRNYFEGSLGEDDNLDFSQNIVVDKEYLLEKISSLARSSERGYIHYIVQLQGDKISYEAACNLFAKTPYDSVLFQKNIEDSEIAYYYNPGDGEIQEIDKYKIPSIISDRPKIKLTFIGHGKDEFNTDIFAGFDVDSLSTEIEAAIDLAKEDISPKSIEINLLGCNMFSYSINVEETYPGKLLLKVKDKISELMPSISQDSIIVSANQYEVRINSEGRRELLDHSGEWINKEESIIKDISSKEYISFNPKENKITVKSKNLPELSTLLQEIRNNSNSSDIELEEKVMLTECEINVISNIDTQIVEERIEEAKNLTSDSINYIKDEFKLIESISDALCDLKQQNELEDSHFISFEDISETDEGFSIRFINKETGESIFVETEKTIFSEYANHITEEISKIKGTIFDTVNGKLVKKVNLDTTHEVNTLNAAFFIQSLIEYNSSKESLSNLSVAMKVQVYAQLFSTGLNTITDAAKVVELVSTALDETIDLLPTLSEGLPIIATIIDGVSLGAAIKELSETSDPLLRQEIEAKIGIMAVNLTTATTAIITSSLGIASGFSILLVPLAGISAGIPSLVNNELVLRDKATKVVDYFKHVSLVETEGVFTLLDDKIMMPQDDLVISEIDFNNNSIVLGKCEIWRMEGGSGHTVTDDIDHFFSAPSITYREPHLSIYDVLEVQKEELDLSKDLMVLPNAPNRVFAWETGWTPGLRSLENDGTKLLDRIRDNYEGEFYWRYFAFIADALITTLKPRYEDTNIRINLDSNTRSFIVPIITTEYIREKLSYSFYGSGGTYALSLSQYNMGINIELSESDVWIIDVDNVVRDVTIESDKIKKGDLIEGILSTLSIEENKIILNSHEINFSGEVNGSNGFVSLTFSILEGINAIIEVDLLSKSYKLLISGELKILMLNSNHIQQKIDYIGFNSELQKNIPYSFVDSEGKENGFINGSTKEGLFVSELPDVVLISKVYMDDSKPSFGYYSNNLKDVKVITKDNVNILTGYYLKDDIKISLSLTLQDEKTIKLNSVHLDESGVAEILKFMNRKGNTNTSDSLMSFLESMNIKSIFVNFLQSNIKFILDANFIISGTTSIGQFEFICDENDNIQPYFIKFNTLETNYTLYVGNRQNMIVEPNYDLDDSGDISSTVINFSQKYLYGIDSCVNKVVISPNIYTDEINITPVYETNNTYPEVIVLDANYINEKINVNINDLSIRYVWSNDGNDFILMSTSEENKVSQVKIRFVNVFKDKTLANKLSFNFSDKQDVPVSEIILSFTPSYYEDGLIGYDLGLVSLYNEKFYINNFGMMVSGLIYINDSLYYFKPPVNNLITGFVTVGDDKYYFNPINGGAASIGETIIDDKNYYFNQSGVLQTGVFSTEDGFKYFAPANTLDENLEGEAIDFTGKLIIDENIYYFDDNYRGAVEWKELDGEMHYFSPETGKAFKGLNQIGDDKYYFNSDGVMQKGFVSINDNKHYFDDSGVMKVGYTEIDGKHFYFAENGEMQIGVFNTEDGFKYFAHHNEDLGNEEGEEISYSGILNFNNKIYYFDDSFTAVVGWKDLEDGSKYYFDEDTAEAYIGLSLINDGQYYFNDDGIMQVGFVTINDKVFYFSDSGIIESGVQNIDDNYFYIDDNGIVQIGVFDTSDGYKYFAPANTVNDNIYGQAVEYSGLVRVGEDVYYFGETYTIETGWIYDMENESDKYYFNPETKKACKGINLIDDIKYYFDEKGIMRTGLISFENNNYYFNENGEMQFGYINIEDKMFYFGEDGVMQIGVFNTPDGFKYFAHQNTLDENFEGESINYTGWLDLDEKRYYFTDEYIAATGSVIIDGEEYYFDPDTAQLVISE

SEQ ID NO: 116 - protein, 2366 aa, Clostridium difficile
MSLVNRKQLEKMANVRFRTQEDEYVAILDALEEYHNMSENTVVEKYLKLKDINSLTDIYIDTYKKSGRNKALKKFKEYLVTEVLELKNNNLTPVEKNLHFVWIGGQINDTAINYINQWKDVNSDYNVNVFYDSNAFLINTLKKTIVESAINDTLESFRENLNNPRFDYNKFFRKRMEIIYDKQKNFINYYKAQREENPELIIDDIVKIYLSNEYSKEIDELNTYIEESLNKIKQNSGNDVRNFEEFKNGESFKLYEQELVERWNLAAASDILRISALKEIGGMYLDVDMLPGIQPDLFESIEKPSSVTVDFWEMTKLEAIMKYKEYIPGYTSEHFDMLDEEVQSSFESALASKSDKSEIFSSLGDMEASPLEVKIAFNSKGIINQGLISVKDSYCSNLIVKQIENRYKILNNSLNPAISEDNDFNTTTNTFIDSIMAEANADNGRFMMELGKYLRVGFFPDVKTTVNLSGPEAYAAAYQDLLMFKEGSMNIHLIEADLRNFEISKTNISQSTEQEMASLWTFDDARAKVQFEEYKRNYFEGSLGEDDNLDFSQNIVVDKEYLLEKISSLARSSERGYIHYIVQLQGDKISYEAACNLFAKTPYDSILFQKNIENSEVAYYYNPGDGEIQEIDKYRIPSIISDRPKIKLTFIGHGKDEFNTDIFAGLDVDSLSTEIETAIDLAKEDISSKSIEINLLGCNMFSYSINVEETYPGKLLLKVKDKISELMPSISQDSIIVSANQYEVRINNEGRRELLDHSGEWINKEESIIKDISSKEYISFNPKENKITVKSKNLPELSTLLQEIRNNSNLSDIELEEKVMLAECEINVISNIDTQIVEERIEEAKNLTSDSINYIKNEFKLIESISDSLYDLKQQNELDDSHFISFEDISKTEDGFSIRFINKETGESIFVETEKEIFSEYANHIEREISNIKDTIFDTVNGKLVKKVNLDAIHEVNTLNAAFFIQSLIGYSSSKESLSNLSVAMKVQVYAQLFSTGLNTITDAAKVVELVSTALDETIDLLPTLSEGLPVIATIIDGVSLGAAIKELSETSDPLLRQEIEAKIGIMAVNLTAATTAIITSSLGIASGFSILLVPLAGISAGIPSLVNNELVLRDKATKVVDYFKHISLVETEGAFTLLDDKIMIPQDDLVISEIDFNNNSIVLGKCEIWRMEGGSGHTVTNDIDHFFSSPTITYIKPHLSIYDVLEVQKEELDLSKDLMVLPNAPNRVFAWETGWTPGLRSLENEGTKLLDRIRDHYKGEFYWRYFAFIADALITTLKPRYEDTNIRINLDSNNRSFIVPIITTEHIREKLSYSFHGSGGTYALSLSQYNMGINIELSESDVWIIDVDNVVRDVTIDSDKIKKGDLIEGILSTLSIEDNKIILNHHEINFSGDVNGSNGFISLTFSILEGINAIIEVDLLSKSYKLLISGELKILMLNSNHIQQKIDYIGFNSELQKNIPYSFVDSEGKENGFINGSTKEGLFVSELPDVVLISKVYMDDSKPSFGYYSNNLKDVKVITKDNVNILTGYYLKDDIKISLSFTLQDEKTIKLNGVHLDESGVAEILKFMNKKGSTNTSDSLMSFLESVNIKSIFVNFLQSKINFILDANFIISGTTSIGQFEFICDENDNIQPYFIKFNTLETTYTLYVGNRQNMIVEPNYDLDDSGDISSTVINFSQKYLYGIDSCVNKVVISPNIYTDEINITPVYETNNNYPEVIVLDANYINEKINVNINDLSIRYVWSNDGNDFILMSTSEENKVSQVKIRFVNVFKDKTLANKLSFNFSDKQDVPVSEIISAFTPSYYEDGLIGYDLGLVSLYNEKFYINNFGMMVSGLIYINDSLYYFKPPVNNLITGFVTVGDDKYYFNPTNGGAASIGETIINDKNYYFNQSGILQTGVFSTEDGLKYFAPANTLDENLEGEAIDFTGKLIIDENIYYFEDNYRGAVEWKELDGEMYYFSPETGKAFKGLNQIGDDKYYFNSDGIMQKGFVSINDKKYYFDDSGVMKVGYIEIDGKYFYFAENGEMQIGVFNTSDGFKYFAHHNEDLGNEEGEAISYSGILNFNNKIYYFDYSFTAVVGWKDLEDGSKYYFDEDTAEAYVGLSLINDGQYYFNDDGIMQVGFVTINNKVFYFSDSGIIESGVQNIDDNYFYIDEKGIVQIGVFDTSDEYKYFAPANTVNDNIYGQAVDYSGLVRVGEDIYYFGETYTIETGWIYDMENESDKYYFNPETKKACKGINLIDDIKYYFDENGIMRTGLISFENNDYYFNENGEMQFGYINIEDKMFYFGEDGVMQIGVFNTQDGFKYFAHQNTLDENFEGESINYTGWLDLDEKRYYFTDEYIAATGSVIIDGEEYYFDPDTAQLVISE

SEQ ID NO: 117 - protein, 2366 aa, Clostridium difficile; identical to SEQ ID NO: 115

SEQ ID NO: 118 - protein, 2366 aa, Clostridium difficile; identical to SEQ ID NO: 116

SEQ ID NO: 119 - protein, 2366 aa, Clostridium difficile; identical to SEQ ID NO: 21

SEQ ID NO: 120 - protein, 2366 aa, Clostridium difficile
MSLVNRKQLEKMANVRFRTQEDEYVAILDALEEYHNMSENTVVEKYLKLKDINSLTDIYIDTYKKSGRNKALKKFKEYLVTEVLELKNNNLTPVEKNLHFVWIGGQINDTAINYINQWKDVNSDYNVNVFYDSNAFLINTLKKTVVESAINDTLESFRENLNDPRFDYNKFFRKRMEIIYDKQKNFINYYKAQREENPELIIDDIVKTYLSNEYSKEIDELNTYIEESLNKITQNSGNDVRNFEEFKNGESFNLYEQELVERWNLAAASDILRISALKEIGGMYLDVDMLPGIQPDLFESIEKPSSVTVDFWEMTKLEAIMKYKEYIPEYTSEHFDMLDEEVQSSFESVLASKSDKSEIFSSLGDMEASPLEVKIAFNSKGIINQGLISVKDSYCSNLIVKQIENRYKILNNSLNPAISEDNDFNTTTNTFIDSIMAEANADNGRFMMELGKYLRVGFFPDVKTTINLSGPEAYAAAYQDLLMFKEGSMNIHLIEADLRNFEIFKTNISQSTEQEMASLWSFDDARAKAQFEEYKRNYFEGSLGEDDNLDFSQNIVVDKEYLLEKISSLARSSERGYIHYIVQLQGDKISYEAACNLFAKTPYDSVLFQKNIEDSEIAYYYNPGDGEIQEIDKYKIPSIISDRPKIKLTFIGHGKDEFNTDIFAGFDVDSLSTEIEAAIDLAKEDISPKSIEINLLGCNMFSYSINVEETYPGKLLLKVKDKISELMPSISQDSIIVSANQYEVRINSEGRRELLDHSGEWINKEESIIKDISSKEYISFNPKENKITVKSKNLPELSTLLQEIRNNSNSSDIELEEKVMLTECEINVISNIDTQIVEERIEEAKNLTSDSINYIKDEFKLIESISDALCDLKQQNELEDSHFISFEDISETDEGFSIRFINKETGESIFVETEKTIFSEYANHITEEISKIKGTIFDTVNGKLVKKVNLDTTHEVNTLNAAFFIQSLIEYNSSKESLSNLSVAMKVQVYAQLFSTGLNTITDAAKVVELVSTALDETIDLLPTLSEGLPIIATIIDGVSLGAAIKELSETSDPLLRQEIEAKIGIMAVNLTTATTAIITSSLGIASGFSILLVPLAGISAGIPSLVNNELVLRDKATKVVDYFKHVSLVETEGVFTLLDDKIMMPQDDLVISEIDFNNNSIVLGKCEIWRMEGGSGHTVTDDIDHFFSAPSITYREPHLSIYDVLEVQKEELDLSKDLMVLPNAPNRVFAWETGWTPGLRSLENDGTKLLDRIRDNYEGEFYWRYFAFIADALITTLKPRYEDTNIRINLDSNTRSFIVPIITTEYIREKLSYSFYGSGGTYALSLSQYNMGINIELSESDVWIIDVDNVVRDVTIESDKIKKGDLIEGILSTLSIEENKIILNSHEINFSGEVNGSNGFVSLTFSILEGINAIIEVDLLSKSYKLLISGELKILMLNSNHIQQKIDYIGFNSELQKNIPYSFVDSEGKENGFINGSTKEGLFVSELPDVVLISKVYMDDSKPSFGYYSNNLKDVKVITKDNVNILTDYYLKDDIKISLSLTLQDEKTIKLNSVHLDESGVAEILKFMNRKGNTNTSDSLMSFLESMNIKSIFVNFLQSNIKFILDANFIISGTTSIGQFEFICDENDNIQPYFIKFNTLETNYTLYVGNRQNMIVEPNYDLDDSGDISSTVINFSQKYLYGIDSCVNKVVISPNIYTDEINITPVYETNNTYPEVIVLDANYINEKINVNINDLSIRYVWSNDGNDFILMSTSEENKVSQVKIRFVNVFKDKTLANKLSFNFSDKQDVPVSEIILSFTPSYYEDGLIGYDLGLVSLYNEKFYINNFGMMVSGLIYINDSLYYFKPPVNNLITGFVTVGDDKYYFNPINGGAASIGETIIDDKNYYFNQSGVLQTGVFSTEDGFKYFAPANTLDENLEGEAIDFTGKLIIDENIYYFDDNYRGAVEWKELDGEMHYFSPETGKAFKGLNQIGDYKYYFNSDGVMQKGFVSINDNKHYFDDSGVMKVGYTEIDGKHFYFAENGEMQIGVFNTEDGFKYFAHHNEDLGNEEGEEISYSGILNFNNKIYYFDDSFTAVVGWKDLEDGSKYYFDEDTAEAYIGLSLINDGQYYFNDDGIMQVGFVTINDKVFYFSDSGIIESGVQNIDDNYFYIDDNGIVQIGVFDTSDGYKYFAPANTVNDNIYGQAVEYSGLVRVGEDVYYFGETYTIETGWIYDMENESDKYYFNPETKKACKGINLIDDIKYYFDEKGIMRTGLISFENNNYYFNENGEMQFGYINIEDKMFYFGEDGVMQIGVFNTPDGFKYFAHQNTLDENFEGESINYTGWLDLDEKRYYFTDEYIAATGSVIIDGEEYYFDPDTAQLVISE

SEQ ID NO: 121 - protein, 2367 aa, Clostridium difficile
MSLVNRKQLEKMANVRFRVQEDEYVAILDALEEYHNMSENTVVEKYLKLKDINSLTDTYIDTYKKSGRNKALKKFKEYLVIEILELKNSNLTPVEKNLHFIWIGGQINDTAINYINQWKDVNSDYNVNVFYDSNAFLINTLKKTIIESASNDTLESFRENLNDPEFNHTAFFRKRMQIIYDKQQNFINYYKAQKEENPDLIIDDIVKTYLSNEYSKDIDELNAYIEESLNKVTENSGNDVRNFEEFKTGEVFNLYEQELVERWNLAGASDILRVAILKNIGGVYLDVDMLPGIHPDLFKDINKPDSVKTAVDWEEMQLEAIMKHKEYIPEYTSKHFDTLDEEVQSSFESVLASKSDKSEIFLPLGDIEVSPLEVKIAFAKGSIINQALISAKDSYCSDLLIKQIQNRYKILNDTLGPIISQGNDFNTTMNNFGESLGAIANEENISFIAKIGSYLRVGFYPEANTTITLSGPTIYAGAYKDLLTFKEMSIDTSILSSELRNFEFPKVNISQATEQEKNSLWQFNEERAKIQFEEYKKNYFEGALGEDDNLDFSQNTVTDKEYLLEKISSSTKSSERGYVHYIVQLQGDKISYEAACNLFAKNPYDSILFQKNIEDSEVAYYYNPTDSEIQEIDKYRIPDRISDRPKIKLTFIGHGKAEFNTDIFAGLDVDSLSSEIETAIGLAKEDISPKSIEINLLGCNMFSYSVNVEETYPGKLLLRVKDKVSELMPSMSQDSIIVSANQYEVRINSEGRRELLDHSGEWINKEESIIKDISSKEYISFNPKENKIIVKSKNLPELSTLLQEIRNNSNSSDIELEEKVMLAECEINVISNIETQVVEERIEEAKSLTSDSINYIKNEFKLIESISDALCDLKQQNELEDSHFISFEDISETDEGFSIRFINKETGESIFVETEKTIFSEYANHITEEISKIKGTIFDTVNGKLVKKVNLDTTHEVNTLNAAFFIQSLIEYNSSKESLSNLSVAMKVQVYAQLFSTGLNTITDAAKVVELVSTALDETIDLLPTLSEGLPIIATIIDGVSLGAAIKELSETSDPLLRQEIEAKIGIMAVNLTTATTAIITSSLGIASGFSILLVPLAGISAGIPSLVNNELVLRDKATKVVDYFKHVSLVETEGVFTLLDDKVMMPQDDLVISEIDFNNNSIVLGKCEIWRMEGGSGHTVTDDIDHFFSAPSITYREPHLSIYDVLEVQKEELDLSKDLMVLPNAPNRVFAWETGWTPGLRSLENDGTKLLDRIRDNYEGEFYWRYFAFIADALITTLKPRYEDTNIRINLDSNTRSFIVPIITTEYIREKLSYSFYGSGGTYALSLSQYNMGINIELSESDVWIIDVDNVVRDVTIESDKIKKGDLIEGILSTLSIEENKIILNSHEINFSGEVNGSNGFVSLTFSILEGINAIIEVDLLSKSYKLLISGELKILMLNSNHIQQKIDYIGFNSELQKNIPYSFVDSEGKENGFINGSTKEGLFVSELPDVVLISKVYMDDSKPSFGYYSNNLKDVKVITKDNVNILTGYYLKDDIKISLSLTLQDEKTIKLNSVHLDESGVAEILKFMNRKGSTNTSDSLMSFLESMNIKSIFVNFLQSNIKFILDANFIISGTTSIGQFEFICDENNNIQPYFIKFNTLETNYTLYVGNRQNMIVEPNYDLDDSGDISSTVINFSQKYLYGIDSCVNKVVISPNIYTDEINITPVYETNNTYPEVIVLDANYINEKINVNINDLSIRYVWSNDGNDFILMSTSEENKVSQVKIRFVNVFKDKTLANKLSFNFSDKQDVPVSEIILSFTPSYYEDGLIGYDLGLVSLYNEKFYINNFGMMVSGLIYINDSLYYFKPPVNNLITGFVTVGDDKYYFNPINGGAASIGETIIDDKNYYFNQSGVLQTGVFSTEDGFKYFAPANTLDENLEGEAIDFTGKLIIDENIYYFEDNYRGAVEWKELDGEMHYFSPETGKAFKGLNQIGDDKYYFNSDGVMQKGFVSINDNKHYFDDSGVMKVGYTEIDGKHFYFAENGEMQIGVFNTEDGFKYFAHHNEDLGNEEGEEISYSGILNFNNKIYYFDDSFTAVVGWKDLEDGSKYYFDEDTAEAYIGLSLINDGQYYFNDDGIMQVGFVTINDKVFYFSDSGIIESGVQNIDDNYFYIDDNGIVQIGVFDTSDGYKYFAPANTVNDNIYGQAVEYSGLVRVGEDVYYFGETYTIETGWIYDMENESDKYYFDPETKKACKGINLIDDIKYYFDEKGIMRTGLISFENNNYYFNENGEMQFGYINIEDKMFYFGEDGVMQIGVFNTPDGFKYFAHQNTLDENFEGESINYTGWLDLDEKRYYFTDEYIAATGSVIIDGEEYYFDPDTAQLVISE

SEQ ID NO: 122 - protein, 2366 aa, Clostridium difficile; identical to SEQ ID NO: 111

SEQ ID NO: 123 - protein, 2366 aa, Clostridium difficile; identical to SEQ ID NO: 116

SEQ ID NO: 124 - protein, 2366 aa, Clostridium difficile; identical to SEQ ID NO: 115

SEQ ID NO: 125 - protein, 2366 aa, Clostridium difficile; identical to SEQ ID NO: 116

SEQ ID NO: 126 - protein, 2367 aa, Clostridium difficile
MSLVNRKQLEKMANVRFRVQEDEYVAILDALEEYHNMSENTVVEKYLKLKDINSLTDTYIDTYKKSGRNKALKKFKEYLVTEILELKNSNLTPVEKNLHFIWIGGQINDTAINYINQWKDVNSDYNVNVFYDSNAFLINTLKKTIIESASNDTLESFRENLNDPEFNHTAFFRKRMQIIYDKQQNFINYYKAQKEENPDLIIDDIVKTYLSNEYSKDIDELNAYIEESLNKVTENSGNDVRNFEEFKTGEVFNLYEQELVERWNLAGASDILRVAILKNIGGVYLDVDMLPGIHPDLFKDINKPDSVKTAVDWEEMQLEAIMKYKEYIPEYTSKHFDTLDEEVQSSFESVLASKSDKSEIFLPLGDIEVSPLEVKIAFAKGSIINQALISAKDSYCSDLLIKQIQNRYKILNDTLGPIISQGNDFNTTMNNFGESLGAIANEENISFIAKIGSYLRVGFYPEANTTITLSGPTIYAGAYKDLLTFKEMSIDTSILSSELRNFEFPKVNISQATEQEKNSLWQFNEERAKIQFEEYKKNYFEGALGEDDNLDFSQNTVIDKEYLLEKISSSTKSSERGYVHYIVQLQGDKISYEAACNLFAKNPYDSILFQKNIEDSEVAYYYNPTDSEIQEIDKYRIPDRISDRPKIKLTLIGHGKAEFNTDIFAGLDVDSLSSEIETIIDLAKADISPKSIEINLLGCNMFSYSVNVEETYPGKLLLRVKDKVSELMPSISQDSIIVSANQYEVRINSEGRRELLDHSGEWINKEESIIKDISSKEYISFNPKENKIIVKSKNLPELSTLLQEIRNNSNSSDIELEEKVMLAECEINVISNIETQVVEERIEEAKSLTSDSINYIKNEFKLIESISDALYDLKQQNELEESHFISFEDISETDEGFSIRFIDKETGESIFVETEKAIFSEYANHITEEISKIKGTIFDTVNGKLVKKVNLDATHEVNTLNAAFFIQSLIEYNSSKESLSNLSVAMKVQVYAQLFSTGLNTITDAAKVVELVSTALDETIDLLPTLSEGLPVIATIIDGVSLGAAIKELSETSDPLLRQEIEAKIGIMAVNLTAATTAIITSSLGIASGFSILLVPLAGISAGIPSLVNNELILRDKATKVVDYFSHISLAESEGAFTSLDDKIMMPQDDLVISEIDFNNNSITLGKCEIWRMEGGSGHTVTDDIDHFFSSPSITYREPHLSIYDVLEVKKEELDLSKDLMVLPNAPNRVFGWETGWTPGLRGLENDGTKLLDRIRDQYEGQFYWRFFAFIADALITTLKPRYEDTNVRISLDSNTRSFIVPVITTEYIREKLSYSFYGSGGTYALSLSQYNMNINIELNENDTWVIDVDNVVRSVTIESDKIKKGDLIENILSKLSIEDNKIILDNHEINFSGTLNGGNGFVSLTFSILEGINAVIEVDLLSKSYKVLISGELKTLMANSNSVQQKIDYIGLNSELQKNIPYSFMDDKGKENGFINCSTKEGLFVSELSDVVLIIKVYMDNSKPPFGYYSNDLKDVKAITKDDVIILTGYYLKDDIKISLSFTIQDKNTIKLNGVYLDENGVAEILKFMNKKGSTNTSDSLMSFLESMNIKSIFIKSLKSNAKLILDTNFIISGTTSIGQFEFICDKDNNIQPYFIKFNTLETKYTLYVGNRQNMIVEPNYDLDDSGDISSTVINFSQKYLYGIDSCVNKVIISPNIYTDEINITPIYEANNTYPEVIVLDTNYISEKINININDLSIRYVWSNDGSDFILMSTDEENKVSQVKIRFTNVFKGNTISDKISFNFSDKQDVSINKIISTFTPSYYVEGLLNYHLGLISLYNEKFYINNFGMMVSGLVYINDSLYYFKPPIKNLITGFTTIGDDKYYFNPDNGGAASVGETIIDGKNYYFSPNGVLQTGVFSTEDGFKYFAPADTLDENLEGEAIDFTGKLIIDENVYYFGDNYRAAIEWQTLDDEVYYFSTDTGRAFKGLNQIGDDKFYFNSDGIMQKGFVNINDKTFYFDDSGVMKSGYTEIDGKHFYFAENGEMQIGVFNTADGFKYFAHHDEDLGNEEGEALSYSGILNFNNKIYYFDDSFTAVVGWKDSEDGSKYYFDEDTAEAYIGISTINDGKYYFNDSGIMQIGFVTINNEVFYFSDSGIVESGMQNIDDNYFYIDENGLVQIGVFDTSDGYKYFAPANTVNDNIYGQAVEYSGLVRVGEDVYYFGETYTIETGWIYDMENESDKYYFDPETKKAYKGINVIDDIKYYFDENGIMRTGLITFEDNHYYFNEDGIMQYGYINIEDKMFYFNEDGVMQIGVFNTADGFKYFAHQNTLDENFEGESINYTGWLDLDEKRYYFTDEYIAAIGSVIIDGEEYYFDPDTAELVISE

SEQ ID NO: 127 - protein, 2367 aa, Clostridium difficile; identical to SEQ ID NO: 126

SEQ ID NO: 128 - protein, 2367 aa, Clostridium difficile
MSLVNRKQLEKMANVRFRVQEDEYVAILDALEEYHNMSENTVVEKYLKLKDINSLTDTYIDTYKKSGRNKALKKFKEYLVTEILELKNSNLTPVEKNLHFIWIGGQINDTAINYINQWKDVNSDYNVNVFYDSNAFLINTLKKTIIESASNDTLESFRENLNDPEFNHTAFFRKRMQIIYDKQQNFINYYKAQKEENPDLIIDDIVKTYLSNEYSKDIDELNAYIEESLNKVTENSGNDVRNFEEFKTGEVFNLYEQELVERWNLAGASDILRVAILKNIGGVYLDVDMLPGIHPDLFKDINKPDSVKTAVDWEEMQLEAIMKYKEYIPEYTSKHFDTLDEEVQSSFESVLASKSDKSEIFLPLGDIEVSPLEVKIAFAKGSIINQALISAKDSYCSDLLIKQIQNRYKILNDTLGPIISQGNDFNTTMNNFGESLGAIANEENISFIAKIGSYLRVGFYPEANTTITLSGPTIYAGAYKDLLTFKEMSIDTSILSSELRNFEFPKVNISQATEQEKNSLWQFNEERAKIQFEEYKKNYFEGALGEDDNLDFSQNTVIDKEYLLEKISSSTKSSERGYVHYIVQLQGDKISYEAACNLFAKNPYDSILFQKNIEDSEVAYYYNPTDSEIQEIDKYRIPDRISDRPKIKLTLIGHGKAEFNTDIFAGLDVDSLSSEIETIIDLAKADISPKSIEINLLGCNMFSYSVNVEETYPGKLLLRVKDKVSELMPSISQDSIIVSANQYEVRINSEGRRELLDHSGEWINKEESIIKDISSKEYISFNPKENKIIVKSKNLPELSTLLQEIRNNSNSSDIELEEKVMLAECEINVISNIETQVVEERIEEAKSLTSDSINYIKNEFKLIESISDALYDLKQQNELEESHFISFEDISETDEGFSIRFIDKETGESIFVETEKAIFSEYANHITEEISKIKGTIFDTVNGKLVKKVNLDATHEVNTLNAAFFIQSLIEYNSSKESLSNLSVAMKVQVYAQLFSTGLNTITDAAKVVELVSTALDETIDLLPTLSEGLPVIATIIDGVSLGAAIKELSETSDPLLRQEIEAKIGIMAVNLTAATTAIITSSLGIASGFSILLVPLAGISAGIPSLVNNELILRDKATKVVDYFSHISLAESEGAFTSLDDKIMMPQDDLVISEIDFNNNSITLGKCEIWRMEGGSGHTVTDDIDHFFSSPSITYREPHLSIYDVLEVKKEELDLSKDLMVLPNAPNRVFGWETGWTPGLRGLENDGTKLLDRIRDQYEGQFYWRFFAFIADALITTLKPRYEDTNVRISLDSNTRSFIVPVITTEYIREKLSYSFYGSGGTYALSLSQYNMNINIELNENDTWVIDVDNVVRSVTIESDKIKKGDLIENILSKLSIEDNKIILDNHEINFSGTLNGGNGFVSLTFSILEGINAVIEVDLLSKSYKVLISGELKTLMANSNSVQQKIDYIGLNSELQKNIPYSFMDDKGKENGFINCSTKDGLFVSELSDVVLIIKVYMDNSKPPFGYYSNDLKDVKAITKDDVIILTGYYLKDDIKISLSFTIQDKNTIKLNGVYLDENGVAEILKFMNKKGSTNTSDSLMSFLESMNIKSIFIKSLKSNAKLILDTNFIISGTTSIGQFEFICDKDNNIQPYFIKFNTLETKYTLYVGNRQNMIVEPNYDLDDSGDISSTVINFSQKYLYGIDSCVNKVIISPNIYTDEINITPIYEANNTYPEVIVLDTNYISEKINININDLSIRYVWSNDGSDFILMSTDEENKVSQVKIRFTNVFKGNTISDKISFNFSDKQDVSINKIISTFTPSYYVEGLLNYHLGLISLYNEKFYINNFGMMVSGLVYINDSLYYFKPPIKNLITGFTTIGDDKYYFNPDNGGAASVGETIIDGKNYYFSPNGVLQTGVFSTEDGFKYFAPADTLDENLEGEAIDFTGKLIIDENVYYFGDNYRAAIEWQTLDDEVYYFSTDTGRAFKGLNQIGDDKFYFNSDGIMQKGFVNINDKTFYFDDSGVMKSGYTEIDGKHFYFAENGEMQIGVFNTADGFKYFAHHDEDLGNEEGEALSYSGILNFNNKIYYFDDSFTAVVGWKDSEDGSKYYFDEDTAEAYIGISTINDGKYYFNDSGIMQIGFVTINNEVFYFSDSGIVESGMQNIDDNYFYIDENGLVQIGVFDTSDGYKYFAPANTVNDNIYGQAVEYSGLVRVGEDVYYFGETYTIETGWIYDMENESDKYYFDPETKKAYKGINVIDDIKYYFDENGIMRTGLITFEDNHYYFNEDGIMQYGYINIEDKMFYFNEDGVMQIGVFNTADGFKYFAHQNTLDENFEGESINYTGWLDLDEKRYYFTDEYIAAIGSVIIDGEEYYFDPDTAELVISE

SEQ ID NO: 129 - protein, 2366 aa, Clostridium difficile; identical to SEQ ID NO: 111

SEQ ID NO: 130 - protein, 2366 aa, Clostridium difficile; identical to SEQ ID NO: 115

SEQ ID NO: 131 - protein, 2366 aa, Clostridium difficile
MSLVNRKQLEKMANVRFRTQEDEYVAILDALEEYHNMSENTVVEKYLKLKDINSLTDIYIDTYKKSGRNKALKKFKEYLVTEVLELKNNNLTPVEKNLHFVWIGGQINDTAINYINQWKDVNSDYNVNVFYDSNAFLINTLKKTVVESAINDTLESFRENLNDPRFDYNKFFRKRMEIIYDKQKNFINYYKAQREENPELIIDDIVKTYLSNEYSKEIDELNTYIEESLNKITQNSGNDVRNFEEFKNGESFNLYEQELVERWNLAAASDILRISALKEIGGMYLDVDMLPGIQPDLFESIEKPSSVTVDFWEMTKLEAIMKYKEYIPEYTSEHFDMLDEEVQSSFESVLASKSDKSEIFSSLGDMEASPLEVKIAFNSKGIINQGLISVKDSYCSNLIVKQIENRYKILNNSLNPAISEDNDFNTTTNTFIDSIMAEANADNGRFMMELGKYLRVGFFPDVKTTINLSGPEAYAAAYQDLLMFKEGSMNIHLIEADLRNFEISKTNISQSTEQEMASLWSFDDARAKAQFEEYKRNYFEGSLGEDDNLDFSQNIVVDKEYLLEKISSLARSSERGYIHYIVQLQGDKISYEAACNLFAKTPYDSVLFQKNIEDSEIAYYYNPGDGEIQEIDKYKIPSIISDRPKIKLTFIGHGKDEFNTDIFAGFDVDSLSTEIEAAIDLAKEDISPKSIEINLLGCNMFSYSINVEETYPGKLLLKVKDKISELMPSISQDSIIVSANQYEVRINSEGRRELLDHSGEWINKEESIIKDISSKEYISFNPKENKITVKSKNLPELSTLLQEIRNNSNSSDIELEEKVMLTECEINVISNIDTQIVEERIEEAKNLTSDSINYIKDEFKLIESISDALCDLKQQNELEDSHFISFEDISETDEGFSIRFINKETGESIFVETEKTIFSEYANHITEEISKIKGTIFDTVNGKLVKKVNLDTTHEVNTLNAAFFIQSLIEYNSSKESLSNLSVAMKVQVYAQLFSTGLNTITDAAKVVELVSTALDETIDLLPTLSEGLPIIATIIDGVSLGAAIKELSETSDPLLRQEIEAKIGIMAVNLTTATTAIITSSLGIASGFSILLVPLAGISAGIPSLVNNELVLRDKATKVVDYFKHVSLVETEGVFTLLDDKIMMPQDDLVISEIDFNNNSIVLGKCEIWRMEGGSGHTVTDDIDHFFSAPSITYREPHLSIYDVLEVQKEELDLSKDLMVLPNAPNRVFAWETGWTPGLRSLENDGTKLLDRIRDNYEGEFYWRYFAFIADALITTLKPRYEDTNIRINLDSNTRSFIVPIITTEYIREKLSYSFYGSGGTYALSLSQYNMGINIELSESDVWIIDVDNVVRDVTIESDKIKKGDLIEGILSTLSIEENKIILNSHEINFSGEVNGSNGFVSLTFSILEGINAIIEVDLLSKSYKLLISGELKILMLNSNHIQQKIDYIGFNSELQKNIPYSFVDSEGKENGFINGSTKEGLFVSELPDVVLISKVYMDDSKPSFGYYSNNLKDVKVITKDNVNILTGYYLKDDIKISLSLTLQDEKTIKLNSVHLDESGVAEILKFMNRKGNTNTSDSLMSFLESMNIKSIFVNFLQSNIKFILDANFIISGTTSIGQFEFICDENDNIQPYFIKFNTLETNYTLYVGNRQNMIVEPNYDLDDSGDISSTVINFSQKYLYGIDSCVNKVVISPNIYTDEINITPVYETNNTYPEVIVLDANYINEKINVNINDLSIRYVWSNDGNDFILMSTSEENKVSQVKIRFVNVFKDKTLANKLSFNFSDKQDVPVSEIILSFTPSYYEDGLIGYDLGLVSLYNEKFYINNFGMMLSGLIYINDSLYYFKPPVNNLITGFVTVGDDKYYFNPINGGAASIGETIIDDKNYYFNQSGVLQTGVFSTEDGFKYFAPANTLDENLEGEAIDFTGKLIIDENIYYFDDNYRGAVEWKELDGEMHYFSPETGKAFKGLNQIGDDKYYFNSDGVMQKGFVSINDNKHYFDDSGVMKVGYTEIDGKHFYFAENGEMQIGVFNTEDGFKYFAHHNEDLGNEEGEEISYSGILNFNNKIYYFDDSFTAVVGWKDLEDGSKYYFDEDTAEAYIGLSLINDGQYYFNDDGIMQVGFVTINDKVFYFSDSGIIESGVQNIDDNYFYIDDNGIVQIGVFDTSDGYKYFAPANTVNDNIYGQAVEYSGLVRVGEDVYYFGETYTIETGWIYDMENESDKYYFNPETKKACKGINLIDDIKYYFDEKGIMRTGLISFENNNYYFNENGEMQFGYINIEDKMFYFGEDGVMQIGVFNTPDGFKYFAHQNTLDENFEGESINYTGWLDLDEKRYYFTDEYIAATGSVIIDGEEYYFDPDTAQLVISE

SEQ ID NO: 132 - protein, 2366 aa, Clostridium difficile; identical to SEQ ID NO: 111

SEQ ID NO: 133 - protein, 2366 aa, Clostridium difficile; identical to SEQ ID NO: 21

SEQ ID NO: 134 - protein, 2710 aa, Clostridium difficile; identical to SEQ ID NO: 88

SEQ ID NO: 135 - protein, 2710 aa, Clostridium difficile
MSLISKEELIKLAYSIRPRENEYKTILTNLDEYNKLTTNNNENKYLQLKKLNESIDVFMNKYKTSSRNRALSNLKKDILKEVILIKNSNTSPVEKNLHFVWIGGEVSDIALEYIKQWADINAEYNIKLWYDSEAFLVNTLKKAIVESSTTEALQLLEEEIQNPQFDNMKFYKKRMEFIYDRQKRFINYYKSQINKPTVPTIDDIIKSHLVSEYNRDETVLESYRTNSLRKINSNHGIDIRANSLFTEQELLNIYSQELLNRGNLAAASDIVRLLALKNFGGVYLDVDMLPGIHSDLFKTISRPSSIGLDRWEMIKLEAIMKYKKYINNYTSENFDKLDQQLKDNFKLIIESKSEKSEIFSKLENLNVSDLEIKIAFALGSVINQALISKQGSYLTNLVIEQVKNRYQFLNQHLNPAIESDNNFTDTTKIFHDSLFNSATAENSMFLTKIAPYLQVGFMPEARSTISLSGPGAYASAYYDFINLQENTIEKTLKASDLIEFKFPENNLSQLTEQEINSLWSFDQASAKYQFEKYVRDYTGGSLSEDNGVDFNKNTALDKNYLLNNKIPSNNVEEAGSKNYVHYIIQLQGDDISYEATCNLFSKNPKNSIIIQRNMNESAKSYFLSDDGESILELNKYRIPERLKNKEKVKVTFIGHGKDEFNTSEFARLSVDSLSNEISSFLDTIKLDISPKNVEVNLLGCNMFSYDFNVEETYPGKLLLSIMDKITSTLPDVNKNSITIGANQYEVRINSEGRKELLAHSGKWINKEEAIMSDLSSKEYIFFDSIDNKLKAKSKNIPGLASISEDIKTLLLDASVSPDTKFILNNLKLNIESSIGDYIYYEKLEPVKNIIHNSIDDLIDEFNLLENVSDELYELKKLNNLDEKYLISFEDISKNNSTYSVRFINKSNGESVYVETEKEIFSKYSEHITKEISTIKNSIITDVNGNLLDNIQLDHTSQVNTLNAAFFIQSLIDYSSNKDVLNDLSTSVKVQLYAQLFSTGLNTIYDSIQLVNLISNAVNDTINVLPTITEGIPIVSTILDGINLGAAIKELLDEHDPLLKKELEAKVGVLAINMSLSIAATVASIVGIGAEVTIFLLPIAGISAGIPSLVNNELILHDKATSVVNYFNHLSESKKYGPLKTEDDKILVPIDDLVISEIDFNNNSIKLGTCNILAMEGGSGHTVTGNIDHFFSSPSISSHIPSLSIYSAIGIETENLDFSKKIMMLPNAPSRVFWWETGAVPGLRSLENDGTRLLDSIRDLYPGKFYWRFYAFFDYAITTLKPVYEDTNIKIKLDKDTRNFIMPTITTNEIRNKLSYSFDGAGGTYSLLLSSYPISTNINLSKDDLWIFNIDNEVREISIENGTIKKGKLIKDVLSKIDINKNKLIIGNQTIDFSGDIDNKDRYIFLTCELDDKISLIIEINLVAKSYSLLLSGDKNYLISNLSNTIEKINTLGLDSKNIAYNYTDESNNKYFGAISKTSQKSIIHYKKDSKNILEFYNDSTLEFNSKDFIAEDINVFMKDDINTITGKYYVDNNTDKSIDFSISLVSKNQVKVNGLYLNESVYSSYLDFVKNSDGHHNTSNFMNLFLDNISFWKLFGFENINFVIDKYFTLVGKTNLGYVEFICDNNKNIDIYFGEWKTSSSKSTIFSGNGRNVVVEPIYNPDTGEDISTSLDFSYEPLYGIDRYINKVLIAPDLYTSLININTNYYSNEYYPEIIVLNPNTFHKKVNINLDSSSFEYKWSTEGSDFILVRYLEESNKKILQKIRIKGILSNTQSFNKMSIDFKDIKKLSLGYIMSNFKSFNSENELDRDHLGFKIIDNKTYYYDEDSKLVKGLININNSLFYFDPIEFNLVTGWQTINGKKYYFDINTGAALTSYKIINGKHFYFNNDGVMQLGVFKGPDGFEYFAPANTQNNNIEGQAIVYQSKFLTLNGKKYYFDNNSKAVTGWRIINNEKYYFNPNNAIAAVGLQVIDNNKYYFNPDTAIISKGWQTVNGSRYYFDTDTAIAFNGYKTIDGKHFYFDSDCVVKIGVFSTSNGFEYFAPANTYNNNIEGQAIVYQSKFLTLNGKKYYFDNNSKAVTGWQTIDSKKYYFNTNTAEAATGWQTIDGKKYYFNTNTAEAATGWQTIDGKKYYFNTNTAIASTGYTIINGKHFYFNTDGIMQIGVFKGPNGFEYFAPANTDANNIEGQAILYQNEFLTLNGKKYYFGSDSKAVTGWRIINNKKYYFNPNNAIAAIHLCTINNDKYYFSYDGILQNGYITIERNNFYFDANNESKMVTGVFKGPNGFEYFAPANTHNNNIEGQAIVYQNKFLTLNGKKYYFDNDSKAVTGWQTIDGKKYYFNLNTAEAATGWQTIDGKKYYFNLNTAEAATGWQTIDGKKYYFNTNTFIASTGYTSINGKHFYFNTDGIMQIGVFKGPNGFEYFAPANTDANNIEGQAILYQNKFLTLNGKKYYFGSDSKAVTGLRTIDGKKYYFNTNTAVAVTGWQTINGKKYYFNTNTSIASTGYTIISGKHFYFNTDGIMQIGVFKGPDGFEYFAPANTDANNIEGQAIRYQNRFLYLHDNIYYFGNNSKAATGWVTIDGNRYYFEPNTAMGANGYKTIDNKNFYFRNGLPQIGVFKGSNGFEYFAPANTDANNIEGQAIRYQNRFLHLLGKIYYFGNNSKAVTGWQTINGKVYYFMPDTAMAAAGGLFEIDGVIYFFGVDGVKAPGIYG

SEQ ID NO: 136 - protein, 2710 aa, Clostridium difficile
MSLISKEELIKLAYSIRPRENEYKTILTNLDEYNKLTTNNNENKYLQLKKLNESIDVFMNKYKTSSRNRALSNLKKDILKEVILIKNSNTSPVEKNLHFVWIGGEVSDIALEYIKQWADINAEYNIKLWYDSEAFLVNTLKKAIVESSTTEALQLLEEEIQNPQFDNMKFYKKRMEFIYDRQKRFINYYKSQINKPTVPTIDDIIKSHLVSEYNRDETVLESYRTNSLRKINSNHGIDIRANSLFTEQELLNIYSQELLNRGNLAAASDIVRLLALKNFGGVYLDVDMLPGIHSDLFKTISRPSSIGLDRWEMIKLEAIMKYKKYINNYTSENFDKLDQQLKDNFKLIIESKSEKSEIFSKLENLNVSDLEIKIAFALGSVINQALISKQGSYLTNLVIEQVKNRYQFLNQHLNPAIESDNNFTDTTKIFHDSLFNSATAENSMFLTKIAPYLQVGFMPEARSTISLSGPGAYASAYYDFINLQENTIEKTLKASDLIEFKFPENNLSQLTEQEINSLWSFDQASAKYQFEKYVRDYTGGSLSEDNGVDFNKNTALDKNYLLNNKIPSNNVEEAGSKNYVHYIIQLQGDDISYEATCNLFSKNPKNSIIIQRNMNESAKSYFLSDDGESILELNKYRIPERLKNKEKVKVTFIGHGKDEFNTSEFARLSVDSLSNEISSFLDTIKLDISPKNVEVNLLGCNMFSYDFNVEETYPGKLLLSIMDKITSTLPDVNKNSITIGANQYEVRINSEGRKELLAHSGKWINKEEAIMSDLSSKEYIFFDSIDNKLKAKSKNIPGLASISEDIKTLLLDASVSPDTKFILNNLKLNIESSIGDYIYYEKLEPVKNIIHNSIDDLIDEFNLLENVSDELYELKKLNNLDEKYLISFEDISKNNSTYSVRFINKSNGESVYVETEKEIFSKYSEHITKEISTIKNSIITDVNGNLLDNIQLDHTSQVNTLNAAFFIQSLIDYSSNKDVLNDLSTSVKVQLYAQLFSTGLNTIYDSIQLVNLISNAVNDTINVLPTITEGIPIVSTILDGINLGAAIKELLDEHDPLLKKELEAKVGVLAINMSLSIAATVASIVGIGAEVTIFLLPIAGISAGIPSLVNNELILHDKATSVVNYFNHLSESKKYGPLKTEDDKILVPIDDLVISEIDFNNNSIKLGTCNILAMEGGSGHTVTGNIDHFFSSPSISSHIPSLSIYSAIGIETENLDFSKKIMMLPNAPSRVFWWETGAVPGLRSLENDGTRLLDSIRDLYPGKFYWRFYAFFDYAITTLKPVYEDTNIKIKLDKDTRNFIMPTITTNEIRNKLSYSFDGAGGTYSLLLSSYPISTNINLSKDDLWIFNIDNEVREISIENGTIKKGKLIKDVLSKIDINKNKLIIGNQTIDFSGDIDNKDRYIFLTCELDDKISLIIEINLVAKSYSLLLSGNKNYLISNLSNTIEKINTLGLDSKNIAYNYTDESNNKYFGAISKTSQKSIIHYKKDSKNILEFYNDSTLEFNSKDFIAEDINVFMKDDINTITGKYYVDNNTDKGIDFSISLVSKNQVKVNGLYLNESVYSSYLDFVKNSDGHHNTSNFMNLFLDNISFWKLFGFENINFVIDKYFTLVGKTNLGYVEFICDNNKNIDIYFGEWKTSSSKSTIFSGNGRNVVVEPIYNPDTGEDISTSLDFSYEPLYGIDRYINKVLIAPDLYTSLININTNYYSNEYYPEIIVLNPNTFHKKVNINLDSSSFEYKWSTEGSDFILVRYLEESNKKILQKIRIKGILSNTQSFNKMSIDFKDIKKLSLGYIMSNFKSFNSENELDRDHLGFKIIDNKTYYYDEDSKLVKGLININNSLFYFDPIEFNLVTGWQTINGKKYYFDINTGAALTSYKIINGKHFYFNNDGVMQLGVFKGPDGFEYFAPANTQNNNIEGQAIVYQSKFLTLNGKKYYFDNDSKAVTGWRIINNEKYYFNPNNAIAAVGLQVIDNNKYYFNPDTAIISKGWQTVNGSRYYFDTDTAIAFNGYKTIDGKHFYFDSDCVVKIGVFSTSNGFEYFAPANTYNNNIEGQAIVYQSKFLTLNGKKYYFDDNSKAVTGWQTIDSKKYYFNTNTAEAATGWQTIDGKKYYFNTNTAEAATGWQTIDGKKYYFNTNTAIASTGYTIINGKHFYFNTDGIMQIGVFKGPNGFEYFAPANTDANNIEGQAILYQNEFLTLNGKKYYFGSDSKAVTGWRIINNKKYYFNPNNAIAAIHLCTINNDKYYFSYDGILQNGYITIERNNFYFDANNESKMVTGVFKGPNGFEYFAPANTHNNNIEGQAIVYQNKFLTLNGKKYYFDNDSKAVTGWQTIDGKKYYFNLNTAEAATGWQTIDGKKYYFNLNTAEAATGWQTIDGKKYYFNTNTFIASTGYTSINGKHFYFNTDGIMQIGVFKGPNGFEYFAPANTHNNNIEGQAILYQNKFLTLNGKKYYFGSDSKAVTGLRTIDGKKYYFNTNTAVAVTGWQTINGKKYYFNTNTSIASTGYTIISGKHFYFNTDGIMQIGVFKGPDGFEYFAPANTDANNIEGQAIRYQNRFLYLHDNIYYFGNNSKAATGWVTIDGNRYYFEPNTAMGANGYKTIDNKNFYFRNGLPQIGVFKGSNGFEYFAPANTDANNIEGQAIRYQNRFLHLLGKIYYFGNNSKAVTGWQTINGKVYYFMPDTAMAAAGGLFEIDGVIYFFGVDGVKAPGIYG

SEQ ID NO: 137 - protein, 2710 aa, Clostridium difficile; identical to SEQ ID NO: 136

SEQ ID NO: 138 - protein, 2710 aa, Clostridium difficile; identical to SEQ ID NO: 88

SEQ ID NO: 139 - protein, 2710 aa, Clostridium difficile; identical to SEQ ID NO: 97

SEQ ID NO: 140 - protein, 2710 aa, Clostridium difficile
MSLISKEELIKLAYSIRPRENEYKTILTNLDEYNKLTTNNNENKYLQLKKLNESIDVFMNKYKTSSRNRALSNLKKDILKEVILIKNSNTSPVEKNLHFVWIGGEVSDIALEYIKQWADINAEYNIKLWYDSEAFLVNTLKKAIVESSTTEALQLLEEEIQNPQFDNMKFYKKRMEFIYDRQKRFINYYKSQINKPTVPTIDDIIKSHLVSEYNRDETVLESYRTNSLRKINSNHGIDIRANSLFTEQELLNIYSQELLNRGNLAAASDIVRLLALKNFGGVYLDVDMLPGIHSDLFKTISRPSSIGLDRWEMIKLEAIMKYKKYINNYTSENFDKLDQQLKDNFKLIIESKSEKSEIFSKLENLNVSDLEIKIAFALGSVINQALISKQGSYLTNLVIEQVKNRYQFLNQHLNPAIESDNNFTDTTKIFHDSLFNSATAENSMFLTKIAPYLQVGFMPEARSTISLSGPGAYASAYYDFINLQENTIEKTLKASDLIEFKFPENNLSQLTEQEINSLWSFDQASAKYQFEKYVRDYTGGSLSEDNGVDFNKNTALDKNYLLNNKIPSNNVEEAGSKNYVHYIIQLQGDDISYEATCNLFSKNPKNSIIIQRNMNESAKSYFLSDDGESILELNKYRIPERLKNKEKVKVTFIGHGKDEFNTSEFARLSVDSLSNEISSFLDTIKLDISPKNVEVNLLGCNMFSYDFNVEETYPGKLLLSIMDKITSTLPDVNKNSITIGANQYEVRINSEGRKELLAHSGKWINKEEAIMSDLSSKEYIFFDSIDNKLKAKSKNIPGLASISEDIKTLLLDASVSPDTKFILNNLKLNIESSIGDYIYYEKLEPVKNIIHNSIDDLIDEFNLLENVSDELYELKKLNNLDEKYLISFEDISKNNSTYSVRFINKSNGESVYVETEKEIFSKYSEHITKEISTIKNSIITDVNGNLLDNIQLDHTSQVNTLNAAFFIQSLIDYSSNKDVLNDLSTSVKVQLYAQLFSTGLNTIYDSIQLVNLISNAVNDTINVLPTITEGIPIVSTILDGINLGAAIKELLDEHDPLLKKELEAKVGVLAINMSLSIAATVASIVGIGAEVTIFLLPIAGISAGIPSLVNNELILHDKATSVVNYFNHLSESKKYGPLKTEDDKILVPIDDLVISEIDFNNNSIKLGTCNILAMEGGSGHTVTGNIDHFFSSPSISSHIPSLSIYSAIGIETENLDFSKKIMMLPNAPSRVFWWETGAVPGLRSLENDGTRLLDSIRDLYPGKFYWRFYAFFDYAITTLKPVYEDTNIKIKLDKDTRNFIMPTITTNEIRNKLSYSFDGAGGTYSLLLSSYPISTNINLSKDDLWIFNIDNEVREISIENGTIKKGKLIKDVLSKIDINKNKLIIGNQTIDFSGDIDNKDRYIFLTCELDDKISLIIEINLVAKSYSLLLSGDKNYLISNLSNTIEKINTLGLDSKNIAYNYTDESNNKYFGAISKTSQKSIIHYKKDSKNILEFYNDSTLEFNSKDFIAEDINVFMKDDINTITGKYYVDNNTDKSIDFSISLVSKNQVKVNGLYLNESVYSSYLDFVKNSDGHHNTSNFMNLFLDNISFWKLFGFENINFVIDKYFTLVGKTNLGYVEFICDNNKNIDIYFGEWKTSSSKSTIFSGNGRNVVVEPIYNPNTGEDISTSLDFSYEPLYGIDRYINKVLIAPDLYTSLININTNYYSNEYYPEIIVLNPNTFHKKVNINLDSSSFEYKWSTEGSDFILVRYLEESNKKILQKIRIKGILSNTQSFNKMSIDFKDIKKLSLGYIMSNFKSFNSENELDRDHLGFKIIDNKTYYYDEDSKLVKGLININNSLFYFDPIEFNLVTGWQTINGKKYYFDINTGAALTSYKIINGKHFYFNNDGVMQLGVFKGPDGFEYFAPANTQNNNIEGQAIVYQSKFLTLNGKKYYFDNNSKAVTGWRIINNEKYYFNPNNAIAAVGLQVIDNNKYYFNPDTAIISKGWQTVNGSRYYFDTDTAIAFNGYKTIDGKHFYFDSDCVVKIGVFSTSNGFEYFAPANTYNNNIEGQAIVYQSKFLTLNGKKYYFDNNSKAVTGWQTIDSKKYYFNTNTAEAATGWQTIDGKKYYFNTNTAEAATGWQTIDGKKYYFNTNTAIASTGYTIINGKHFYFNTDGIMQIGVFKGPNGFEYFAPANTDANNIEGQAILYQNEFLTLNGKKYYFGSDSKAVTGWRIINNKKYYFNPNNAIAAIHLCTINNDKYYFSYDGILQNGYITIERNNFYFDANNESKMVTGVFKGPNGFEYFAPANTHNNNIEGQAIVYQNKFLTLNGKKYYFDNDSKAVTGWQTIDGKKYYFNLNTAEAATGWQTIDGKKYYFNLNTAEAATGWQTIDGKKYYFNTNTFIASTGYTSINGKHFYFNTDGIMQIGVFKGPNGFEYFAPANTDANNIEGQAILYQNKFLTLNGKKYYFGSDSKAVTGLRTIDGKKYYFNTNTAVAVTGWQTINGKKYYFNTNTSIASTGYTIISGKHFYFNTDGIMQIGVFKGPDGFEYFAPANTDANNIEGQAIRYQNRFLYLHDNIYYFGNNSKAATGWVTIDGNRYYFEPNTAMGANGYKTIDNKNFYFRNGLPQIGVFKGSNGFEYFAPANTDANNIEGQAIRYQNRFLHLLGKIYYFGNNSKAVTGWQTINGKVYYFMPDTAMAAAGGLFEIDGVIYFFGVDGVKAPGIYG

SEQ ID NO: 141 - protein, 2366 aa, Clostridium difficile; identical to SEQ ID NO: 111

SEQ ID NO: 142 - protein, 2366 aa, Clostridium difficile
MSLVNRKQLEKMANVRFRTQEDEYVAILDALEEYHNMSENTVVEKYLKLKDINSLTDIYIDTYKKSGRNKALKKFKEYLVTEVLELKNNNLTPVEKNLHFVWIGGQINDTAINYINQWKDVNSDYNVNVFYDSNAFLINTLKKTVVESAINDTLESFRENLNDPRFDYNKFFRKRMEIIYDKQKNFINYYKAQREENPELIIDDIVKTYLSNEYSKEIDELNTYIEESLNKITQNSGNDVRNFEEFKNGESFNLYEQELVERWNLAAASDILRISALKEIGGMYLDVDMLPGIQPDLFESIEKPSSVTVDFWEMTKLEAIMKYKEYIPEYTSEHFDMLDEEVQSSFESVLASKSDKSEIFSSLGDMEASPLEVKIAFNSKGIINQGLISVKDSYCSNLIVKQIENRYKILNNSLNPAISEDNDFNTTTNTFIDSIMAEANADNGRFMMELGKYLRVGFFPDVKTTINLSGPEAYAAAYQDLLMFKEGSMNIHLIEADLRNFEISKTNISQSTEQEMASLWSFDDARAKAQFEEYKRNYFEGSLGEDDNLDFSQNIVVDKEYLLEKISSLARSSERGYIHYIVQLQGDKISYEAACNLFAKTPYDSVLFQKNIEDSEIAYYYNPGDGEIQEIDKYKIPSIISDRPKIKLTFIGHGKDEFNTDIFAGFDVDSLSTEIEAAIDLAKEDISPKSIEINLLGCNMFSYSINVEETYPGKLLLKVKDKISELMPSISQDSIIVSANQYEVRINSEGRRELLDHSGEWINKEESIIKDISSKEYISFNPKENKITVKSKNLPELSTLLQEIRNNSNSSDIELEEKVMLTECEINVISNIDTQIVEERIEEAKNLTSDSINYIKDEFKLIESISDALCDLKQQNELEDSHFISFEDISETDEGFSIRFINKETGESIFVETEKTIFSEYANHITEEISKIKGTIFDTVNGKLVKKVNLDTTHEVNTLNAAFFIQSLIEYNSSKESLSNLSVAMKVQVYAQLFSTGLNTITDAAKVVELVSTALDETIDLLPTLSEGLPIIATIIDGVSLGAAIKELSETSDPLLRQEIEAKIGIMAVNLTTATTAIITSSLGVASGFSILLVPLAGISAGIPSLVNNELVLRDKATKVVDYFKHVSLVETEGVFTLLDDKIMMPQDDLVISEIDFNNNSIVLGKCEIWRMEGGSGHTVTDDIDHFFSAPSITYREPHLSIYDVLEVQKEELDLSKDLMVLPNAPNRVFAWETGWTPGLRSLENDGTKLLDRIRDNYEGEFYWRYFAFIADALITTLKPRYEDTNIRINLDSNTRSFIVPIITTEYIREKLSYSFYGSGGTYALSLSQYNMGINIELSESDVWIIDVDNVVRDVTIESDKIKKGDLIEGILSTLSIEENKIILNSHEINFSGEVNGSNGFVSLTFSILEGINAIIEVDLLSKSYKLLISGELKILMLNSNHIQQKIDYIGFNSELQKNIPYSFVDSEGKENGFINGSTKEGLFVSELPDVVLISKVYMDDSKPSFGYYSNNLKDVKVITKDNVNILTGYYLKDDIKISLSLTLQDEKTIKLNSVHLDESGVAEILKFMNRKGSTNTSDSLMSFLESMNIKSIFVNFLQSNIKFILDANFIISGTTSIGQFEFICDENDNIQPYFIKFNTLETNYTLYVGNRQNMIVEPNYDLDDSGDISSTVINFSQKYLYGIDSCVNKVVISPNIYTDEINITPVYETNNTYPEVIVLDANYINEKINVNINDLSIRYVWSNDGNDFILMSTSEENKVSQVKIRFVNVFKDKTLANKLSFNFSDKQDVPVSEIILSFTPSYYEDGLIGYDLGLVSLYNEKFYINNFGMMVSGLIYINDSLYYFKPPVNNLITGFVTVGDDKYYFNPINGGAASIGETIIDDKNYYFNQSGVLQTGVFSTEDGFKYFAPANTLDENLEGEAIDFTGKLIIDENIYYFDDNYRGAVEWKELDGEMHYFSPETGKAFKGLNQIGDDKYYFNSDGVMQKGFVSINDNKHYFDDSGVMKVGYTEIDGKHFYFAENGEMQIGVFNTEDGFKYFAHHNEDLGNEEGEEISYSGILNFNNKIYYFDDSFTAVVGWKDLEDGSKYYFDEDTAEAYIGLSLINDGQYYFNDDGIMQVGFVTINDKVFYFSDSGIIESGVQNIDDNYFYIDDNGIVQIGVFDTSDGYKYFAPANTVNDNIYGQAVEYSGLVRVGEDVYYFGETYTIETGWIYDMENESDKYYFNPETKKACKGINLIDDIKYYFDEKGIMRTGLISFENNNYYFNENGEMQFGYINIEDKMFYFGEDGVMQIGVFNTPDGFKYFAHQNTLDENFEGESINYTGWLDLDEKRYYFTDEYIAATGSVIIDGEEYYFDPDTAQLVISE

SEQ ID NO: 143 - protein, 2366 aa, Clostridium difficile
MSLVNRKQLEKMANVRFRTQEDEYVAILDALEEYHNMSENTVVEKYLKLKDINSLTDIYIDTYKKSGRNKALKKFKEYLVTEVLELKNNNLTPVEKNLHFVWIGGQINDTAINYINQWKDVNSDYNVNVFYDSNAFLINTLKKTVVESAINDTLESFRENLNDPRFDYNKFFRKRMEIIYDKQKNFINYYKAQREENPELIIDDIVKTYLSNEYSKEIDELNTYIEESLNKITQNSGNDVRNFEEFKNGESFNLYEQELVERWNLAAASDILRISALKEIGGMYLDVDMLPGIQPDLFESIEKPSSVTVDFWEMTKLEAIMKYKEYIPEYTSEHFDMLDEEVQSSFESVLASKSDKSEIFSSLGDMEASPLEVKIAFNSKGIINQGLISVKDSYCSNLIVKQIENRYKILNNSLNPAISEDNDFNTTTNTFIDSIMAEANADNGRFMMELGKYLRVGFFPDVKTTINLSGPEAYAAAYQDLLMFKEGSMNIHLIEADLRNFEISKTNISQSTEQEMASLWSFDDSRAKAQFEEYKRNYFEGSLGEDDNLDFSQNIVVDKEYLLEKISSLARSSERGYIHYIVQLQGDKISYEAACNLFAKTPYDSVLFQKNIEDSEIAYYYNPGDGEIQEIDKYKIPSIISDRPKIKLTFIGHGKDEFNTDIFAGFDVDSLSTEIEAAIDLAKEDISPKSIEINLLGCNMFSYSINVEETYPGKLLLKVKDKISELMPSISQDSIIVSANQYEVRINSEGRRELLDHSGEWINKEESIIKDISSKEYISFNPKENKITVKSKNLPELSTLLQEIRNNSNSSDIELEEKVMLTECEINVISNIDTQIVEERIEEAKNLTSDSINYIKDEFKLIESISDALCDLKQQNELEDSHFISFEDISETDEGFSIRFINKETGESIFVETEKTIFSEYANHITEEISKIKGTIFDTVNGKLVKKVNLDTTHEVNTLNAAFFIQSLIEYNSSKESLSNLSVAMKVQVYAQLFSTGLNTITDAAKVVELVSTALDETIDLLPTLSEGLPIIATIIDGVSLGAAIKELSETSDPLLRQEIEAKIGIMAVNLTTATTAIITSSLGVASGFSILLVPLAGISAGIPSLVNNELVLRDKATKVVDYFKHVSLVETEGVFTLLDDKIMMPQDDLVISEIDFNNNSIVLGKCEIWRMEGGSGHTVTDDIDHFFSAPSITYREPHLSIYDVLEVQKEELDLSKDLMVLPNAPNRVFAWETGWTPGLRSLENDGTKLLDRIRDNYEGEFYWRYFAFIADALITTLKPRYEDTNIRINLDSNTRSFIVPIITTEYIREKLSYSFYGSGGTYALSLSQYNMGINIELSESDVWIIDVDNVVRDVTIESDKIKKGDLIEGILSTLSIEENKIILNSHEINFSGEVNGSNGFVSLTFSILEGINAIIEVDLLSKSYKLLISGELKILMLNSNHIQQKIDYIGFNSELQKNIPYSFVDSEGKENGFINGSTKEGLFVSELPDVVLISKVYMDDSKPSFGYYSNNLKDVKVITKDNVNILTGYYLKDDIKISLSLTLQDEKTIKLNSVHLDESGVAEILKFMNRKGSTNTSDSLMSFLESMNIKSIFVNFLQSNIKFILDANFIISGTTSIGQFEFICDENDNIQPYFIKFNTLETNYTLYVGNRQNMIVEPNYDLDDSGDISSTVINFSQKYLYGIDSCVNKVVISPNIYTDEINITPVYETNNTYPEVIVLDANYINEKINVNINDLSIRYVWSNDGNDFILMSTSEENKVSQVKIRFVNVFKDKTLANKLSFNFSDKQDVPVSEIILSFTPSYYEDGLIGYDLGLVSLYNEKFYINNFGMMVSGLIYINDSLYYFKPPVNNLITGFVTVGDDKYYFNPINGGAASIGETIIDDKNYYFNQSGVLQTGVFSTEDGFKYFAPANTLDENLEGEAIDFTGKLIIDENIYYFDDNYRGAVEWKELDGEMHYFSPETGKAFKGLNQIGDDKYYFNSDGVMQKGFVSINDNKHYFDDSGVMKVGYTEIDGKHFYFAENGEMQIGVFNTEDGFKYFAHHNEDLGNEEGEEISYSGILNFNNKIYYFDDSFTAVVGWKDLEDGSKYYFDEDTAEAYIGLSLINDGQYYFNDDGIMQVGFVTINDKVFYFSDSGIIESGVQNIDDNYFYIDDNGIVQIGVFDTSDGYKYFAPANTVNDNIYGQAVEYSGLVRVGEDVYYFGETYTIETGWIYDMENESDKYYFNPETKKACKGINLIDDIKYYFDEKGIMRTGLISFENNNYYFNENGEMQFGYINIEDKMFYFGEDGVMQIGVFNTPDGFKYFAHQNTLDENFEGESINYTGWLDLDEKRYYFTDEYIAATGSVIIDGEEYYFDPDTAQLVISE

SEQ ID NO: 144 - protein, 2366 aa, Clostridium difficile; identical to SEQ ID NO: 143

SEQ ID NO: 145 - protein, 2366 aa, Clostridium difficile; identical to SEQ ID NO: 143

SEQ ID NO: 146 - protein, 2366 aa, Clostridium difficile
MSLVNRKQLEKMANVRFRTQEDEYVAILDALEEYHNMSENTVVEKYLKLKDINSLTDIYIDTYKKSGRNKALKKFKEYLVTEVLELKNNNLTPVEKNLHFVWIGGQINDTAINYINQWKDVNSDYNVNVFYDSNAFLINTLKKTVVESAINDTLESFRENLNDPRFDYNKFFRKRMEIIYDKQKNFINYYKAQREENPELIIDDIVKTYLSNEYSKEIDELNTYIEESLNKITQNSGNDVRNFEEFKNGESFNLYEQELVERWNLAAASDILRISALKEIGGMYLDVDMLPGIQPDLFESIEKPSSVTVDFWEMTKLEAIMKYKEYIPEYTSEHFDMLDEEVQSSFESVLASKSDKSEIFSSLGDMEASPLEVKIAFNSKGIINQGLISVKDSYCSNLIVKQIENRYKILNNSLNPAISEDNDFNTTTNTFIDSIMAEANADNGRFMMELGKYLRVGFFPDVKTTINLSGPEAYAAAYQDLLMFKEGSMNIHLIEADLRNFEIFKTNISQSTEQEMASLWSFDDSRAKAQFEEYKRNYFEGSLGEDDNLDFSQNIVVDKEYLLEKISSLARSSERGYIHYIVQLQGDKISYEAACNLFAKTPYDSVLFQKNIEDSEIAYYYNPGDGEIQEIDKYKIPSIISDRPKIKLTFIGHGKDEFNTDIFAGFDVDSLSTEIEAAIDLAKEDISPKSIEINLLGCNMFSYSINVEETYPGKLLLKVKDKISELMPSISQDSIIVSANQYEVRINSEGRRELLDHSGEWINKEESIIKDISSKEYISFNPKENKITVKSKNLPELSTLLQEIRNNSNSSDIELEEKVMLTECEINVISNIDTQIVEERIEEAKNLTSDSINYIKDEFKLIESISDALCDLKQQNELEDSHFISFEDISETDEGFSIRFINKETGESIFVETEKTIFSEYANHITEEISKIKGTIFDTVNGKLVKKVNLDTTHEVNTLNAAFFIQSLIEYNSSKESLSNLSVAMKVQVYAQLFSTGLNTITDAAKVVELVSTALDETIDLLPTLSEGLPIIATIIDGVSLGAAIKELSETSDPLLRQEIEAKIGIMAVNLTTATTAIITSSLGVASGFSILLVPLAGISAGIPSLVNNELVLRDKATKVVDYFKHVSLVETEGVFTLLDDKIMMPQDDLVISEIDFNNNSIVLGKCEIWRMEGGSGHTVTDDIDHFFSAPSITYREPHLSIYDVLEVQKEELDLSKDLMVLPNAPNRVFAWETGWTPGLRSLENDGTKLLDRIRDNYEGEFYWRYFAFIADALITTLKPRYEDTNIRINLDSNTRSFIVPIITTEYIREKLSYSFYGSGGTYALSLSQYNMGINIELSESDVWIIDVDNVVRDVTIESDKIKKGDLIEGILSTLSIEENKIILNSHEINFSGEVNGSNGFVSLTFSILEGINAIIEVDLLSKSYKLLISGELKILMLNSNHIQQKIDYIGFNSELQKNIPYSFVDSEGKENGFINGSTKEGLFVSELPDVVLISKVYMDDSKPSFGYYSNNLKDVKVITKDNVNILTGYYLKDDIKISLSLTLQDEKTIKLNSVHLDESGVAEILKFMNRKGSTNTSDSLMSFLESMNIKSIFVNFLQSNIKFILDANFIISGTTSIGQFEFICDENDNIQPYFIKFNTLETNYTLYVGNRQNMIVEPNYDLDDSGDISSTVINFSQKYLYGIDSCVNKVVISPNIYTDEINITPVYETNNTYPEVIVLDANYINEKINVNINDLSIRYVWSNDGNDFILMSTSEENKVSQVKIRFVNVFKDKTLANKLSFNFSDKQDVPVSEIILSFTPSYYEDGLIGYDLGLVSLYNEKFYINNFGMMVSGLIYINDSLYYFKPPVNNLITGFVTVGDDKYYFNPINGGAASIGETIIDDKNYYFNQSGVLQTGVFSTEDGFKYFAPANTLDENLEGEAIDFTGKLIIDENIYYFDDNYRGAVEWKELDGEMHYFSPETGKAFKGLNQIGDDKYYFNSDGVMQKGFVSINDNKHYFDDSGVMKVGYTEIDGKHFYFAENGEMQIGVFNTEDGFKYFAHHNEDLGNEEGEEISYSGILNFNNKIYYFDDSFTAVVGWKDLEDGSKYYFDEDTAEAYIGLSLINDGQYYFNDDGIMQVGFVTINDKVFYFSDSGIIESGVQNIDDNYFYIDDNGIVQIGVFDTSDGYKYFAPANTVNDNIYGQAVEYSGLVRVGEDVYYFGETYTIETGWIYDMENESDKYYFNPETKKACKGINLIDDIKYYFDEKGIMRTGLISFENNNYYFNENGEMQFGYINIEDKMFYFGEDGVMQIGVFNTPDGFKYFAHQNTLDENFEGESINYTGWLDLDEKRYYFTDEYIAATGSVIIDGEEYYFDPDTAQLVISE

SEQ ID NO: 147 - protein, 2366 aa, Clostridium difficile; identical to SEQ ID NO: 146

SEQ ID NO: 148 - protein, 2710 aa, Clostridium difficile; identical to SEQ ID NO: 88

SEQ ID NO: 149 - protein, 2710 aa, Clostridium difficile; identical to SEQ ID NO: 88

SEQ ID NO: 150 - protein, 2710 aa, Clostridium difficile
MSLISKEELIKLAYSIRPRENEYKTILTNLDEYNKLTTNNNENKYLQLKKLNESIDVFMNKYKTSSRNRALSNLKKDILKEVILIKNSNTSPVEKNLHFVWIGGEVSDIALEYIKQWADINAEYNIKLWYDSEAFLVNTLKKAIVESSTTEALQLLEEEIQNPQFDNMKFYKKRMEFIYDRQKRFINYYKSQINKPTVPTIDDIIKSHLVSEYNRDETVLESYRTNSLRKINSNHGIDIRANSLFTEQELLNIYSQELLNRGNLAAASDIVRLLALKNFGGVYLDVDMLPGIHSDLFKTISRPSSIGLDRWEMIKLEAIMKYKKYINNYTSENFDKLDQQLKDNFKLIIESKSEKSEIFSKLENLNVSDLEIKIAFALGSVINQALISKQGSYLTNLVIEQVKNRYQFLNQHLNPAIESDNNFTDTTKIFHDSLFNSATAENSMFLTKIAPYLQVGFMPEARSTISLSGPGAYASAYYDFINLQENTIEKTLKASDLIEFKFPENNLSQLTEQEINSLWSFDQASAKYQFEKYVRDYTGGSLSEDNGVDFNKNTALDKNYLLNNKIPSNNVEEAGSKNYVHYIIQLQGDDISYEATCNLFSKNPKNSIIIQRNMNESAKSYFLSDDGESILELNKYRIPERLKNKEKVKVTFIGHGKDEFNTSEFARLSVDSLSNEISSFLDTIKLDISPKNVEVNLLGCNMFSYDFNVEETYPGKLLLSIMDKITSTLPDVNKNSITIGANQYEVRINSEGRKELLAHSGKWINKEEAIMSDLSSKEYIFFDSIDNKLKAKSKNIPGLASISEDIKTLLLDASVSPDTKFILNNLKLNIESSIGDYIYYEKLEPVKNIIHNSIDDLIDEFNLLENVSDELYELKKLNNLDEKYLISFEDISKNNSTYSVRFINKSNGESVYVETEKEIFSKYSEHITKEISTIKNSIITDVNGNLLDNIQLDHTSQVNTLNAAFFIQSLIDYSSNKDVLNDLSTSVKVQLYAQLFSTGLNTIYDSIQLVNLISNAVNDTINVLPTITEGIPIVSTILDGINLGAAIKELLDEHDPLLKKELEAKVGVLAINMSLSIAATVASIVGIGAEVTIFLLPIAGISAGIPSLVNNELILHDKATSVVNYFNHLSESKKYGPLKTEDDKILVPIDDLVISEIDFNNNSIKLGTCNILAMEGGSGHTVTGNIDHFFSSPSISSHIPSLSIYSAIGIETENLDFSKKIMMLPNAPSRVFWWETGAVPGLRSLENDGTRLLDSIRDLYPGKFYWRFYAFFDYAITTLKPVYEDTNIKIKLDKDTRNFIMPTITTNEIRNKLSYSFDGAGGTYSLLLSSYPISTNINLSKDDLWIFNIDNEVREISIENGTIKKGKLIKDVLSKIDINKNKLIIGNQTIDFSGDIDNKDRYIFLTCELDDKISLIIEINLVAKSYSLLLSGDKNYLISNLSNTIEKINTLGLDSKNIAYNYTDESNNKYFGAISKTSQKSIIHYKKDSKNILEFYNDSTLEFNSKDFIAEDINVFMKDDINTITGKYYVDNNTDKSIDFSISLVSKNQVKVNGLYLNESVYSSYLDFVKNSDGHHNTSNFMNLFLDNISFWKLFGFENINFVIDKYFTLVGKTNLGYVEFICDNNKNIDIYFGEWKTSSSKSTIFSGNGRNVVVEPIYNPDTGEDISTSLDFSYEPLYGIDRYINKVLIAPDLYTSLININTNYYSNEYYPEIIVLNPNTFHKKVNINLDSSSFEYKWSTEGSDFILVRYLEESNKKILQKIRIKGILSNTQSFNKMSIDFKDIKKLSLGYIMSNFKSFNSENELDRDHLGFKIIDNKTYYYDEDSKLVKGLININNSLFYFDPIEFNLVTGWQTINGKKYYFDINTGAALTSYKIINGKHFYFNNDGVMQLGVFKGPDGFEYFAPANTQNNNIEGQAIVYQSKFLTLNGKKYYFDNDSKAVTGWRIINNEKYYFNPNNAIAAVGLQVIDNNKYYFNPDTAIISKGWQTVNGSRYYFDTDTAIAFNGYKTIDGKHFYFDSDCVVKIGVFSTSNGFEYFAPANTYNNNIEGQAIVYQSKFLTLNGKKYYFDDNSKAVTGWQTIDSKKYYFNTNTAEAATGWQTIDGKKYYFNTNTAEAATGWQTIDGKKYYFNTNTAIASTGYTIINGKHFYFNTDGIMQIGVFKGPNGFEYFAPANTDANNIEGQAILYQNEFLTLNGKKYYFGSDSKAVTGWRIINNKKYYFNPNNAIAAIHLCTINNDKYYFSYDGILQNGYITIERNNFYFDANNESKMVTGVFKGPNGFEYFAPANTYNNNIEGQAIVYQNKFLTLNGKKYYFDNDSKAVTGWQTIDGKKYYFNLNTAEAATGWQTIDGKKYYFNLNTAEAATGWQTIDGKKYYFNTNTFIASTGYTSINGKHFYFNTDGIMQIGVFKGPNGFEYFAPANTHNNNIEGQAILYQNKFLTLNGKKYYFGSDSKAVTGLRTIDGKKYYFNTNTAVAVTGWQTINGKKYYFNTNTSIASTGYTIISGKHFYFNTDGIMQIGVFKGPDGFEYFAPANTDANNIEGQAIRYQNRFLYLHDNIYYFGNNSKAATGWVTIDGNRYYFEPNTAMGANGYKTIDNKNFYFRNGLPQIGVFKGSNGFEYFAPANTDANNIEGQAIRYQNRFLHLLGKIYYFGNNSKAVTGWQTINGKVYYFMPDTAMAAAGGLFEIDGVIYFFGVDGVKAPGIYG

SEQ ID NO: 151 - protein, 2710 aa, Clostridium difficile
MSLISKEELIKLAYSIRPRENEYKTILTNLDEYNKLTTNNNENKYLQLKKLNESIDVFMNKYKTSSRNRALSNLKKDILKEVILIKNSNTSPVEKNLHFVWIGGEVSDIALEYIKQWADINAEYNIKLWYDSEAFLVNTLKKAIVESSTTEALQLLEEEIQNPQFDNMKFYKKRMEFIYDRQKRFINYYKSQINKPTVPTIDDIIKSHLVSEYNRDETVLESYRTNSLRKINSNHGIDIRANSLFTEQELLNIYSQGLLNRGNLAAASDIVRLLALKNFGGVYLDVDMLPGIHSDLFKTISRPSSIGLDRWEMIKLEAIMKYKKYINNYTSENFDKLDQQLKDNFKLIIESKSEKSEIFSKLENLNVSDLEIKIAFALGSVINQALISKQGSYLTNLVIEQVKNRYQFLNQHLNPAIESDNNFTDTTKIFHDSLFNSATAENSMFLTKIAPYLQVGFMPEARSTISLSGPGAYASAYYDFINLQENTIEKTLKASDLIEFKFPENNLSQLTEQEINSLWSFDQASAKYQFEKYVRDYTGGSLSEDNGVDFNKNTALDKNYLLNNKIPSNNVEEAGSKNYVHYIIQLQGDDISYEATCNLFSKNPKNSIIIQRNMNESAKSYFLSDDGESILELNKYRIPERLKNKEKVKVTFIGHGKDEFNTSEFARLSVDSLSNEISSFLDTIKLDISPKNVEVNLLGCNMFSYDFNVEETYPGKLLLSIMDKITSTLPDVNKNSITIGANQYEVRINSEGRKELLAHSGKWINKEEAIMSDLSSKEYIFFDSIDNKLKAKSKNIPGLASISEDIKTLLLDASVSPDTKFILNNLKLNIESSIGDYIYYEKLEPVKNIIHNSIDDLIDEFNLLENVSDELYELKKLNNLDEKYLISFEDISKNNSTYSVRFINKSNGESVYVETEKEIFSKYSEHITKEISTIKNSIITDVNGNLLDNIQLDHTSQVNTLNAAFFIQSLIDYSSNKDVLNDLSTSVKVQLYAQLFSTGLNTIYDSIQLVNLISNAVNDTINVLPTITEGIPIVSTILDGINLGAAIKELLDEHDPLLKKELEAKVGVLAINMSLSIAATVASIVGIGAEVTIFLLPIAGISAGIPSLVNNELILHDKATSVVNYFNHLSESKKYGPLKTEDDKILVPIDDLVISEIDFNNNSIKLGTCNILAMEGGSGHTVTGNIDHFFSSPSISSHIPSLSIYSAIGIETENLDFSKKIMMLPNAPSRVFWWETGAVPGLRSLENDGTRLLDSIRDLYPGKFYWRFYAFFDYAITTLKPVYEDTNIKIKLDKDTRNFIMPTITTNEIRNKLSYSFDGAGGTYSLLLSSYPISTNINLSKDDLWIFNIDNEVREISIENGTIKKGKLIKDVLSKIDINKNKLIIGNQTIDFSGDIDNKDRYIFLTCELDDKISLIIEINLVAKSYSLLLSGDKNYLISNLSNIIEKINTLGLDSKNIAYNYTDESNNKYFGAISKTSQKSIIHYKKDSKNILEFYNDSTLEFNSKDFIAEDINVFMKDDINTITGKYYVDNNTDKSIDFSISLVSKNQVKVNGLYLNESVYSSYLDFVKNSDGHHNTSNFMNLFLDNISFWKLFGFENINFVIDKYFTLVGKTNLGYVEFICDNNKNIDIYFGEWKTSSSKSTIFSGNGRNVVVEPIYNPDTGEDISTSLDFSYEPLYGIDRYINKVLIAPDLYTSLININTNYYSNEYYPEIIVLNPNTFHKKVNINLDSSSFEYKWSTEGSDFILVRYLEESNKKILQKIRIKGILSNTQSFNKMSIDFKDIKKLSLGYIMSNFKSFNSENELDRDHLGFKIIDNKTYYYDEDSKLVKGLININNSLFYFDPIEFNLVTGWQTINGKKYYFDINTGAALISYKIINGKHFYFNNDGVMQLGVFKGPDGFEYFAPANTQNNNIEGQAIVYQSKFLTLNGKKYYFDNDSKAVTGWRIINNEKYYFNPNNAIAAVGLQVIDNNKYYFNPDTAIISKGWQTVNGSRYYFDTDTAIAFNGYKTIDGKHFYFDSDCVVKIGVFSTSNGFEYFAPANTYNNNIEGQAIVYQSKFLTLNGKKYYFDNNSKAVTGWQTIDSKKYYFNTNTAEAATGWQTIDGKKYYFNTNTAEAATGWQTIDGKKYYFNTNTAIASTGYTIINGKHFYFNTDGIMQIGVFKGPNGFEYFAPANTDANNIEGQAILYQNEFLTLNGKKYYFGSDSKAVTGWRIINNKKYYFNPNNAIAAIHLCTINNDKYYFSYDGILQNGYITIERNNFYFDANNESKMVTGVFKGPNGFEYFAPANTHNNNIEGQAIVYQNKFLTLNGKKYYFDNDSKAVTGWQTIDGKKYYFNLNTAEAATGWQTIDGKKYYFNLNTAEAATGWQTIDGKKYYFNTNTFIASTGYTSINGKHFYFNTDGIMQIGVFKGPNGFEYFAPANTHNNNIEGQAILYQNKFLTLNGKKYYFGSDSKAVTGLRTIDGKKYYFNTNTAVAVTGWQTINGKKYYFNTNTSIASTGYTIISGKHFYFNTDGIMQIGVFKGPDGFEYFAPANTDANNIEGQAIRYQNRFLYLHDNIYYFGNNSKAATGWVTIDGNRYYFEPNTAMGANGYKTIDNKNFYFRNGLPQIGVFKGSNGFEYFAPANTDANNIEGQAIRYQNRFLHLLGKIYYFGNNSKAVTGWQTINGKVYYFMPDTAMAAAGGLFEIDGVIYFFGVDGVKAPGIYG

SEQ ID NO: 152 - protein, 2710 aa, Clostridium difficile; identical to SEQ ID NO: 98

SEQ ID NO: 153 - protein, 2710 aa, Clostridium difficile
MSLISKEELIKLAYSIRPRENEYKTILTNLDEYNKLTTNNNENKYLQLKKLNESIDVFMNKYKNSSRNRALSNLKKDILKEVILIKNSNTSPVEKNLHFVWIGGEVSDIALEYIKQWADINAEYNIKLWYDSEAFLVNTLKKAIVESSTTEALQLLEEEIQNPQFDNMKFYKKRMEFIYDRQKRFVNYYKSQINKPTVPTIDDIIKSHLVSEYNRDETLLESYRTNSLRKINSNHGIDIRANSLFTEQELLNIYSQELLNRGNLAAASDIVRLLALKNFGGVYLDVDMLPGIHSDLFKTISRPSSIGLDRWEMIKLEAIMKYKKYINNYTSENFDKLDQQLKDNFKLIIESKSEKSEIFSKLENLNVSDLEIKIAFALGSVINQALISKQGSYLTNLVIEQVKNRYQFLNQHLNPAIESDNNFTDTTKIFHDSLFNSATAENSMFLTKIAPYLQVGFMPEARSTISLSGPGAYASAYYDFINLQENTIEKTLKASDLIEFKFPENNLSQLTEQEINSLWSFDQASAKYQFEKYVRDYTGGSLSEDNEVDFNKNTALDKNYLLNNKIPSNNVEEAGSKNYVHYIIQLQGDDISYEATCNLFSKNPKNSIIIQRNMNESAKSYFLSDDGESILELNKYRIPERLKNKEKVKVTFIGHGKDEFNTSEFARLSVDSLSNEISSFLDTIKLDISPKNVEVNLLGCNMFSYDFNVEETYPGKLLLSIMDKITSTLPDVNKDSITIGANQYEVRINSEGRKELLAHSGKWINKEEAIMSDLSSKEYIFFDSIDNKLKAKSKNIPGLASISEDIKTLLLDTSVSPDTKFILNNLKLNIESSVGDYIYYEKLEPVKNIIHNSIDDLIDEFNLLENVSDELYELKKLNNLDEKYLISFEDISKNNSTYSVRFINKSNGESVYVETEKEIFSKYSEHITKEISTIKNSIITDVNGNLLDNIQLDHTSQVNTLNAAFFIQSLIDYSSNKDLLNDLSTSVKVQLYAQLFSTGLNTIYDSIQLVNLISNAVNDTINVLPTITEGIPIVSTILDGINLGAAIKELLDEHDPLLKKELEAKVGVLAINMSLSIAATVASIVGIGAEVTIFLLPIAGISAGIPSLVNNELILHDKATSVVNYFNHLSESKEYGPLKTEDDKILVPIDDLVISEIDFNNNAIKLGTCNILAMEGGSGHTVTGNIDHFFSSPSISSHIPSLSIYSAIGIKTENLDFSKKIMMLPNAPSRVFWWETGAVPGLRSLENNGTKLLDSIRDLYPGKFYWRFYAFFDYAITTLKPVYEDTNIKIKLDKDTRNFIMPTITTNEIRNKLSYSFDGAGGTYSLLLSSYPISTNINLSKDDLWIFNIDNEVREISIENGTIKKGKLIKDVLSKIDINKNKLIIGNQTIDFSGDIDNKDRYIFLTCELDDKISLIIEINLVAKSYSLLLSGDKNYLISNLSNTIEKINTLGLDSKNIAYNYTDESNNKYFGAISKTSQKSIIHYKKDSKNILEFYNGSTLEFNSKDFIAEDINVFMKDDINTITGKYYVDNNTDKSIDFSISLVSKNQAKVNGLYLNESVYSSYLDFVKNADGHHNTSNFMNLFLDNISFWKLFGFENINFVVDKYFTLVGKTNLGYVEFICDNNKNIDIYFGEWKTSSSKSTIFSGNGRNVVVEPIYNPDTGEDISTSLDFSYEPLYGIDRYINKVLIAPDLYTSLININTNYYSNEYYPEIIVLNPNTFHKKVNINLDSSSFEYKWSTEGSDFILVRYLEESNKKILQKIRIKGILSNTQSFNKMSIDFKDIKKLSLVYIMSNFKSFNSENELDRDHLGFKIIDNKTYYYDEASKLVKGLININNSLFYFDPIESNLVTGWQTINGKKYYFDINTGAALTSYKIINGKHFYFNNNGVMQLGVFKGPDRFEYFAPANTQNNNIEGQAIVYQSKFLTLNGKKYYFDNDSKAVTGWRIINNEKYYFNPNNAIAAVGLQVIDNNKYYFNPDTAIISKGWQTVNGSRYYFDTDTAIAFNGYKTIDGKHFYFDSDCVVKIGVFSGSNGFEYFAPANTYNNNIEGQAIVYQSKFLTLNGKKYYFDNNSKAVTGWQTIDSKKYYFNTNTAEAATGWQTIDGKKYYFNTNTAEAATGWQTIDGKKYYFNTNTSIASTGYTIINGKHFYFNTDGIMQIGVFKGPNGFEYFAPANTDANNIEGQAILYQNKFLTLNGKKYYFASDSKAVTGWRIINNKKYYFNPNNAIAATHLYTINNDKYYFSYDGILQNGYITIERNNFYFDANNESKMVTGVFKGPNGFEYFAPANTHNNNIEGQAIVYQNKFLTLNGKKYYFDNDSKAVTGWQTIDGKKYYFNLNTAVAVTGWQTIDGKKYYFNLNTAEAATGWQTIDGKKYYFNTNTFIASTGYTSINGKHFYFNTDGIMQIGVFKGPNGFEYFAPANTHNNNIEGQAILYQNKFLTLNGKKYYFASDSKAVTGLRTIDGKKYYFNTNTAVAATGWQTINGKKYYFNTNTSIASTGYTIINGKHFYFNTDGIMQIGVFKGPDGFEYFAPANTDANNIEGQAIRYQNRFLYLHDNIYYFGNNSKAATGWVTIDGRRYYFEPNTAIGANGYKIIDNKNFYFRNGLPQIGVFKGPNGFEYFAPANTDANNIDGQAIRYQNRFLHLLGNIYYFGNNSKAVTGWQTINGNMYYFMPDTAMAAAGGLFEIDGVIYFFGVDGVKAPGIYG

SEQ ID NO: 154 - protein, 2710 aa, Clostridium difficile; identical to SEQ ID NO: 88

SEQ ID NO: 155 - protein, 2710 aa, Clostridium difficile; identical to SEQ ID NO: 98

SEQ ID NO: 156 - protein, 2710 aa, Clostridium difficile; identical to SEQ ID NO: 151

SEQ ID NO: 157 - protein, 2710 aa, Clostridium difficile
MSLISKEELIKLAYSIRPRENEYKTILTNLDEYNKLTTNNNENKYLQLKKLNESIDVFMNKYKTSSRNRALSNLKKDILKEVILIKNSNTSPVEKNLHFVWIGGEVSDIALEYIKQWADINAEYNIKLWYDSEAFLVNTLKKAIVESSTTEALQLLEEEIQNPQFDNMKFYKKRMEFIYDRQKRFINYYKSQINKPTVPTIDDIIKSHLVSEYNRDETVLESYRTNSLRKINSNHGIDIRANSLFTEQELLNIYSQELLNRGNLAAASDIVRLLALKNFGGVYLDVDMLPGIHSDLFKTISRPSSIGLDRWEMIKLEAIMKYKKYINNYTSENFDKLDQQLKDNFKLIIESKSEKSEIFSKLENLNVSDLEIKIAFALGSVINQALISKQGSYLTNLVIEQVKNRYQFLNQHLNPAIESDNNFTDTTKIFHDSLFNSATAENSMFLTKIAPYLQVGFMPEARSTISLSGPGAYASAYYDFINLQENTIEKTLKASDLIEFKFPENNLSQLTEQEINSLWSFDQASAKYQFEKYVRDYTGGSLSEDNGVDFNKNTALDKNYLLNNKIPSNNVEEAGSKNYVHYIIQLQGDDISYEATCNLFSKNPKNSIIIQRNMNESAKSYFLSDDGESILELNKYRIPERLKNKEKVKVTFIGHGKDEFNTSEFARLSVDSLSNEISSFLDTIKLDISPKNVEVNLLGCNMFSYDFNVEETYPGKLLLSIMDKITSTLPDVNKNSITIGANQYEVRINSEGRKELLAHSGKWINKEEAIMSDLSSKEYIFFDSIDNKLKAKSKNIPGLASISEDIKTLLLDASVSPDTKFILNNLKLNIESSIGDYIYYEKLEPVKNIIHNSIDDLIDEFNLLENVSDELYELKKLNNLDEKYLISFEDISKNNSTYSVRFINKSNGESVYVETEKEIFSKYSEHITKEISTIKNSIITDVNGNLLDNIQLDHTSQVNTLNAAFFIQSLIDYSSNKDVLNDLSTSVKVQLYAQLFSTGLNTIYDSIQLVNLISNAVNDTINVLPTITEGIPIVSTILDGINLGAAIKELLDEHDPLLKKELEAKVGVLAINMSLSIAATVASIVGIGAEVTIFLLPIAGISAGIPSLVNNELILHDKATSVVNYFNHLSESKKYGPLKTEDDKILVPIDDLVISEIDFNNNSIKLGTCNILAMEGGSGHTVTGNIDHFFSSPSISSHIPSLSIYSAIGIETENLDFSKKIMMLPNAPSRVFWWETGAVPGLRSLENDGTRLLDSIRDLYPGKFYWRFYAFFDYAITTLKPVYENTNIKIKLDKDTRNFIMPTITTNEIRNKLSYSFDGAGGTYSLLLSSYPISTNINLSKDDLWIFNIDNEVREISIENGTIKKGKLIKDVLSKIDINKNKLIIGNQTIDFSGDIDNKDRYIFLTCELDDKISLIIEINLVAKSYSLLLSGDKNYLISNLSNTIEKINTLGLDSKNIAYNYTDESNNKYFGAISKTSQKSIIHYKKDSKNILEFYNDSTLEFNSKDFIAEDINVFMKDDINTITGKYYVDNNTDKSIDFSISLVSKNQVKVNGLYLNESVYSSYLDFVKNSDGHHNTSNFMNLFLDNISFWKLFGFENINFVIDKYFTLVGKTNLGYVEFICDNNKNIDIYFGEWKTSSSKSTIFSGNGRNVVVEPIYNPDTGEDISTSLDFSYEPLYGIDRYINKVLIAPDLYTSLININTNYYSNEYYPEIIVLNPNTFHKKVNINLDSSSFEYKWSTEGSDFILVRYLEESNKKILQKIRIKGILSNTQSFNKMSIDFKDIKKLSLGYIMSNFKSFNSENELDRDHLGFKIIDNKTYYYDEDSKLVKGLININNSLFYFDPIEFNLVTGWQTINGKKYYFDINTGAALTSYKIINGKHFYFNNDGVMQLGVFKGPDGFEYFAPANTQNNNIEGQAIVYQSKFLTLNGKKYYFDNDSKAVTGWRIINNEKYYFNPNNAIAAVGLQVIDNNKYYFNPDTAIISKGWQTVNGSRYYFDTDTAIAFNGYKTIDGKHFYFDSDCVVKIGVFSTSNGFEYFAPANTYNNNIEGQAIVYQSKFLTLNGKKYYFDDNSKAVTGWQTIDSKKYYFNTNTAEAATGWQTIDGKKYYFNTNTAEAATGWQTIDGKKYYFNTNTSIASTGYTSINGKHFYFNTDGIMQIGVFKGPNGFEYFAPANTDANNIEGQAILYQNEFLTLNGKKYYFGSDSKAVTGWRIINNKKYYFNPNNAIAAIHLCTINNDKYYFSYDGILQNGYITIERNNFYFDANNESKMVTGVFKGPNGFEYFAPANTHNNNIEGQAIVYQNKFLTLNGKKYYFDNDSKAVTGWQTIDGKKYYFNLNTAEAATGWQTIDGKKYYFNLNTAEAATGWQTIDGKKYYFNTNTFIASTGYTSINGKHFYFNTDGIMQIGVFKGPNGFEYFAPANTHNNNIEGQAILYQNKFLTLNGKKYYFGSDSKAVTGLRTIDGKKYYFNTNTAVAVTGWQTINGKKYYFNTNTSIASTGYTIISGKHFYFNTDGIMQIGVFKGPDGFEYFAPANTDANNIEGQAIRYQNRFLYLHDNIYYFGNNSKAATGWVTIDGNRYYFEPNTAMGANGYKTIDNKNFYFRNGLPQIGVFKGSNGFEYFAPANTDANNIEGQAIRYQNRFLHLLGKIYYFGNNSKAVTGWQTINGKVYYFMPDTAMAAAGGLFEIDGVIYFFGVDGVKAPGIYG

SEQ ID NO: 158 - protein, 2366 aa, Clostridium difficile; identical to SEQ ID NO: 111

SEQ ID NO: 159 - protein, 2366 aa, Clostridium difficile; identical to SEQ ID NO: 111

SEQ ID NO: 160 - protein, 2366 aa, Clostridium difficile
MSLVNRKQLEKMANVRFRTQEDEYVAILDALEEYHNMSENTVVEKYLKLKDINSLTDIYIDTYKKSGRNKALKKFKEYLVTEVLELKNNNLTPVEKNLHFVWIGGQINDTAINYINQWKDVNSDYNVNVFYDSNAFLINTLKKTVVESAINDTLESFRENLNDPRFDYNKFFRKRMEIIYDKQKNFINYYKAQREENPELIIDDIVKTYLSNEYSKEIDELNTYIEESLNKITQNSGNDVRNFEEFKNGESFNLYEQELVERWNLAAASDILRISALKEIGGMYLDVDMLPGIQPGLFESIEKPSSVTVDFWEMTKLEAIMKYKEYIPEYTSEHFDMLDEEVQSSFESVLASKSDKSEIFSSLGDMEASPLEVKIAFNSKGIINQGLISVKDSYCSNLIVKQIENRYKILNNSLNPAISEDNDFNTTTNTFIDSIMAEANADNGRFMMELGKYLRVGFFPDVKTTINLSGPEAYAAAYQDLLMFKEGSMNIHLIEADLRNFEISKTNISQSTEQEMASLWSFDDARAKAQFEEYKRNYFEGSLGEDDNLDFSQNIVVDKEYLLEKISSLARSSERGYIHYIVQLQGDKISYEAACNLFAKTPYDSVLFQKNIEDSEIAYYYNPGDGEIQEIDKYKIPSIISDRPKIKLTFIGHGKDEFNTDIFAGFDVDSLSTEIEAAIDLAKEDISPKSIEINLLGCNMFSYSINVEETYPGKLLLKVKDKISELMPSISQDSIIVSANQYEVRINSEGRRELLDHSGEWINKEESIIKDISSKEYISFNPKENKITVKSKNLPELSTLLQEIRNNSNSSDIELEEKVMLTECEINVISNIDTQIVEERIEEAKNLTSDSINYIKDEFKLIESISDALCDLKQQNELEDSHFISFEDISETDEGFSIRFINKETGESIFVETEKTIFSEYANHITEEISKIKGTIFDTVNGKLVKKVNLDTTHEVNTLNAAFFIQSLIEYNSSKESLSNLSVAMKVQVYAQLFSTGLNTITDAAKVVELVSTALDETIDLLPTLSEGLPIIATIIDGVSLGAAIKELSETSDPLLRQEIEAKIGIMAVNLTTATTAIITSSLGVASGFSILLVPLAGISAGIPSLVNNELVLRDKATKVVDYFKHVSLVETEGVFTLLDDKIMMPQDDLVISEIDFNNNSIVLGKCEIWRMEGGSGHTVTDDIDHFFSAPSITYREPHLSIYDVLEVQKEELDLSKDLMVLPNAPNRVFAWETGWTPGLRSLENDGTKLLDRIRDNYEGEFYWRYFAFIADALITTLKPRYEDTNIRINLDSNTRSFIVPIITTEYIREKLSYSFYGSGGTYALSLSQYNMGINIELSESDVWIIDVDNVVRDVTIESDKIKKGDLIEGILSTLSIEENKIILNSHEINFSGEVNGSNGFVSLTFSILEGINAIIEVDLLSKSYKLLISGELKILMLNSNHIQQKIDYIGFNSELQKNIPYSFVDSEGKENGFINGSTKEGLFVSELPDVVLISKVYMDDSKPSFGYYSNNLKDVKVITKDNVNILTGYYLKDDIKISLSLTLQDEKTIKLNSVHLDESGVAEILKFMNRKGNTNTSDSLMSFLESMNIKSIFVNFLQSNIKFILDANFIISGTTSIGQFEFICDENDNIQPYFIKFNTLETNYTLYVGNRQNMIVEPNYDLDDSGDISSTVINFSQKYLYGIDSCVNKVVISPNIYTDEINITPVYETNNTYPEVIVLDANYINEKINVNINDLSIRYVWSNDGNDFILMSTSEENKVSQVKIRFVNVFKDKTLANKLSFNFSDKQDVPVSEIILSFTPSYYEDGLIGYDLGLVSLYNEKFYINNFGMMVSGLIYINDSLYYFKPPVNNLITGFVTVGDDKYYFNPINGGAASIGETIIDDKNYYFNQSGVLQTGVFSTEDGFKYFAPANTLDENLEGEAIDFTGKLIIDENIYYFDDNYRGAVEWKELDGEMHYFSPETGKAFKGLNQIGDYKYYFNSDGVMQKGFVSINDNKHYFDDSGVMKVGYTEIDGKHFYFAENGEMQIGVFNTEDGFKYFAHHNEDLGNEEGEEISYSGILNFNNKIYYFDDSFTAVVGWKDLEDGSKYYFDEDTAEAYIGLSLINDGQYYFNDDGIMQVGFVTINDKVFYFSDSGIIESGVQNIDDNYFYIDDNGIVQIGVFDTSDGYKYFAPANTVNDNIYGQAVEYSGLVRVGEDVYYFGETYTIETGWIYDMENESDKYYFNPETKKACKGINLIDDIKYYFDEKGIMRTGLISFENNNYYFNENGEMQFGYINIEDKMFYFGEDGVMQIGVFNTPDGFKYFAHQNTLDENFEGESINYTGWLDLDEKRYYFTDEYIAATGSVIIDGEEYYFDPDTAQLVISE

SEQ ID NO: 161 - protein, 2366 aa, Clostridium difficile; identical to SEQ ID NO: 160

SEQ ID NO: 162 - protein, 2366 aa, Clostridium difficile; identical to SEQ ID NO: 160

SEQ ID NO: 163 - protein, 2366 aa, Clostridium difficile
MSLVNRKQLEKMANVRFRTQEDEYVAILDALEEYHNMSENTVVEKYLKLKDINSLTDIYIDTYKKSGRNKALKKFKEYLVTEVLELKNNNLTPVEKNLHFVWIGGQINDTAINYINQWKDVNSDYNVNVFYDSNAFLINTLKKTIVESAINDTLESFRENLNNPRFDYNKFFRKRMEIIYDKQKNFINYYKAQREENPELIIDDIVKIYLSNEYSKEIDELNTYIEESLNKIKQNSGNDVRNFEEFKNGESFKLYEQELVERWNLAAASDILRISALKEIGGMYLDVDMLPGIQPGLFESIEKPSSVTVDFWEMTKLEAIMKYKEYIPGYTSEHFDMLDEEVQSSFESALASKSDKSEIFSSLGDMEASPLEVKIAFNSKGIINQGLISVKDSYCSNLIVKQIENRYKILNNSLNPAISEDNDFNTTTNTFIDSIMAEANADNGRFMMELGKYLRVGFFPDVKTTVNLSGPEAYAAAYQDLLMFKEGSMNIHLIEADLRNFEISKTNISQSTEQEMASLWTFDDARAKVQFEEYKRNYFEGSLGEDDNLDFSQNIVVDKEYLLEKISSLARSSERGYIHYIVQLQGDKISYEAACNLFAKTPYDSILFQKNIENSEVAYYYNPGDGEIQEIDKYRIPSIISDRPKIKLTFIGHGKDEFNTDIFAGLDVDSLSTEIETAIDLAKEDISSKSIEINLLGCNMFSYSINVEETYPGKLLLKVKDKISELMPSISQDSIIVSANQYEVRINNEGRRELLDHSGEWINKEESIIKDISSKEYISFNPKENKITVKSKNLPELSTLLQEIRNNSNLSDIELEEKVMLAECEINVISNIDTQIVEERIEEAKNLTSDSINYIKNEFKLIESISDSLYDLKQQNELDDSHFISFEDISKTEDGFSIRFINKETGESIFVETEKEIFSEYANHIRGEISNIKDTIFDTVNGKLVKKVNLDAIHEVNTLNAAFFIQSLIGYSSSKESLSNLSVAMKVQVYAQLFSTGLNTITDAAKVVELVSTALDETIDLLPTLSEGLPVIATIIDGVSLGAAIKELSETSDPLLRQEIEAKIGIMAVNLTAATTAIITSSLGVASGFSILLVPLAGISAGIPSLVNNELVLRDKATKVVDYFKHISLVETEGAFTLLDDKIMIPQDDLVISEIDFNNNSIVLGKCEIWRMEGGSGHTVTNDIDHFFSSPTITYIKPHLSIYDVLEVQKEELDLSKDLMVLPNAPNRVFAWETGWTPGLRSLENEGTKLLDRIRDHYKGEFYWRYFAFIADALITTLKPRYEDTNIRINLDSNNRSFIVPIITTEHIREKLSYSFHGSGGTYALSLSQYNMGINIELSESDVWIIDVDNVVRDVTIDSDKIKKGDLIEGILSTLSIEDNKIILNHHEINFSGDVNGSNGFISLTFSILEGINAIIEVDLLSKSYKLLISGELKILMLNSNHIQQKIDYIGFNSELQKNIPYSFVDSEGKENGFINGSTKEGLFVSELPDVVLISKVYMDDSKPSFGYYSNNLKDVKVITKDNVNILTGYYLKDDIKISLSFTLQDEKTIKLNGVHLDESGVAEILKFMNKKGSTNTSDSLMSFLESVNIKSIFVNFLQSKINFILDANFIISGTTSIGQFEFICDENDNIQPYFIKFNTLETTYTLYVGNRQNMIVEPNYDLDDSGDISSTVINFSQKYLYGIDSCVNKVVISPNIYTDEINITPVYETNNNYPEVIVLDANYINEKINVNINDLSIRYVWSNDGNDFILMSTSEENKVSQVKIRFVNVFKDKTLANKLSFNFSDKQDVPVSEIISAFTPSYYEDGLIGYDLGLVSLYNEKFYINNFGMMVSGLIYINDSLYYFKPPVNNLITGFVTVGDDKYYFNPTNGGAASIGETIINDKNYYFNQSGILQTGVFSTEDGLKYFAPANTLDENLEGEAIDFTGKLIIDENIYYFEDNYRGAVEWKELDGEMYYFSPETGKAFKGLNQIGDDKYYFNSDGIMQKGFVSINDKKYYFDDSGVMKVGYIEIDGKYFYFAENGEMQIGVFNTSDGFKYFAHHNEDLGNEEGEAISYSGILNFNNKIYYFDYSFTAVVGWKDLEDGSKYYFDEDTAEAYVGLSLINDGQYYFNDDGIMQVGFVTINNKVFYFSDSGIIESGVQNIDDNYFYIDEKGIVQIGVFDTSDEYKYFAPANTVNDNIYGQAVDYSGLVRVGEDIYYFGETYTIETGWIYDMENESDKYYFNPETKKACKGINLIDDIKYYFDENGIMRTGLISFENNDYYFNENGEMQFGYINIEDKMFYFGEDGVMQIGVFNTQDGFKYFAHQNTLDENFEGESINYTGWLDLDEKRYYFTDEYIAATGSVIIDGEEYYFDPDTAQLVISE

SEQ ID NO: 164 - protein, 2366 aa, Clostridium difficile; identical to SEQ ID NO: 163

SEQ ID NO: 165 - protein, 2366 aa, Clostridium difficile; identical to SEQ ID NO: 163

SEQ ID NO: 166 - protein, 2366 aa, Clostridium difficile; identical to SEQ ID NO: 163

SEQ ID NO: 167 - protein, 2366 aa, Clostridium difficile
MSLVNRKQLEKMANVRFRTQEDEYVAILDALEEYHNMSENTVVEKYLKLKDINSLTDIYIDTYKKSGRNKALKKFKEYLVIEVLELKNNNLTPVEKNLHFVWIGGQINDTAINYINQWKDVNSDYNVNVFYDSNAFLINTLKKTIVESAINDTLESFRENLNNPRFDYNKFFRKRMEIIYDKQKNFINYYKAQREENPELIIDDIVKIYLSNEYSKEIDELNTYIEESLNKIKQNSGNDVRNFEEFKNGESFKLYEQELVERWNLAAASDILRISALKEIGGMYLDVDMLPGIQPGLFESIEKPSSVTVDFWEMTKLEAIMKYKEYIPGYTSEHFDMLDEEVQSSFESALASKSDKSEIFSSLGDMEASPLEVKIAFNSKGIINQGLISVKDSYCSNLIVKQIENRYKILNNSLNPAISEDNDFNTTTNTFIDSIMAEANADNGRFMMELGKYLRVGFFPDVKTTVNLSGPEAYAAAYQDLLMFKEGSMNIHLIEADLRNFEISKTNISQSTEQEMASLWTFDDARAKVQFEEYKRNYFEGSLGEDDNLDFSQNIVVDKEYLLEKISSLARSSERGYIHYIVQLQGDKISYEAACNLFAKTPYDSILFQKNIENSEVAYYYNPGDGEIQEIDKYRIPSIISDRPKIKLTFIGHGKDEFNTDIFAGLDVDSLSTEIETAIDLAKEDISSKSIEINLLGCNMFSYSINVEETYPGKLLLKVKDKISELMPSISQDSIIVSANQYEVRINNEGRRELLDHSGEWINKEESIIKDISSKEYISFNPKENKITVKSKNLPELSTLLQEIRNNSNLSDIELEEKVMLAECEINVISNIDTQIVEERIEEAKNLTSDSINYIKNEFKLIESISDSLYDLKQQNELDDSHFISFEDISKTEDGFSIRFINKETGESIFVETEKEIFSEYANHIRGEISNIKDTIFDTVNGKLVKKVNLDAIHEVNTLNAAFFIQSLIGYSSSKESLSNLSVAMKVQVYAQLFSTGLNTITDAAKVVELVSTALDETIDLLPTLSEGLPVIATIIDGVSLGAAIKELSETSDPLLRQEIEAKIGIMAVNLTAATTAIITSSLGVASGFSILLVPLAGISAGIPSLVNNELVLRDKATKVVDYFKHISLVETEGAFTLLDDKIMIPQDDLVISEIDFNNNSIVLGKCEIWRMEGGSGHTVTNDIDHFFSSPTITYIKPHLSIYDVLEVQKEELDLSKDLMVLPNAPNRVFAWETGWTPGLRSLENEGTKLLDRIRDHYKGEFYWRYFAFIADALITTLKPRYEDTNIRINLDSNNRSFIVPIITTEHIREKLSYSFHGSGGTYALSLSQYNMGINIELSESDVWIIDVDNVVRDVTIDSDKIKKGDLIEGILSTLSIEDNKIILNHHEINFSGDVNGSNGFISLTFSILEGINAIIEVDLLSKSYKLLISGELKILMLNSNHIQQKIDYIGFNSELQKNIPYSFVDSEGKENGFINGSTKEGLFVSELPDVVLISKVYMDDSKPSFGYYSNNLKDVKVITKDNVNILTGYYLKDDIKISLSFTLQDEKTIKLNGVHLDESGVAEILKFMNKKGSTNTSDSLMSFLESVNIKSIFVNFLQSKINFILDANFIISGTTSIGQFEFICDENDNIQPYFIKFNTLETTYTLYVGNRQNMIVEPNYDLDDSGDISSTVINFSQKYLYGIDSCVNKVVISPNIYTDEINITPVYETNNNYPEVIVLDANYINEKINVNINDLSIRYVWSNDGNDFILMSTSEENKVSQVKIRFVNVFKDKTLANKLSFNFSDKQDVPVSEIISAFTPSYYEDGLIGYDLGLVSLYNEKFYINNFGMMVSGLIYINDSLYYFKPPVNNLITGFVTVGDDKYYFNPTNGGAASIGETIINDKNYYFNQSGILQTGVFSTEDGLKYFAPANTLDENLEGEAIDFTGKLIIDENIYYFEDNYRGAVEWKELDGEMYYFSPETGKAFKGLNQIGDDKYYFNSDGIMQKGFVSINDKKYYFDDSGVMKVGYIEIDGKYFYFAENGEMQIGVFNTSDGFKYFAHHNEDLGNEEGEAISYSGILNFNNKIYYFDYSFTAVVGWKDLEDGSKYYFDEDTAEAYVGLSLINDGQYYFNDDGIMQVGFVTINNKVFYFSDSGIIESGVQNIDDNYFYIDEKGIVQIGVFDTSDEYKYFAPANTVNDNIYGQAVDYSGLVRVGEDIYYFGETYTIETGWIYDMENESDKYYFNPETKKACKGINLIDDIKYYFDENGIMRTGLISFENNDYYFNENGEMQFGYINIEDKMFYFGEDGVMQIGVFNTQDGFKYFAHQNTLDENFEGESINYTGWLDLDEKRYYFTDEYIAATGSVIIDGEEYYFDPDTAQLVISE

SEQ ID NO: 168 - protein, 2710 aa, Clostridium difficile; identical to SEQ ID NO: 92

SEQ ID NO: 169 - protein, 2710 aa, Clostridium difficile
MSLISKEELIKLAYSIRPRENEYKTILTNLDEYNKLTTNNNENKYLQLKKLNESIDVFMNKYKNSSRNRALSNLKKDILKEVILIKNSNTSPVEKNLHFVWIGGEVSDIALEYIKQWADINAEYNIKLWYDSEAFLVNTLKKAIVESSTTEALQLLEEEIQNPQFDNMKFYKKRMEFIYDRQKRFVNYYKSQINKPTVPTIDDIIKSHLVSEYNRDETLLESYRTNSLRKINSNHGIDIRANSLFTEQELLNIYSQELLNRGNLAAASDIVRLLALKNFGGVYLDVDMLPGIHSDLFKTISRPSSIGLDRWEMIKLEAIMKYKKYINNYTSENFDKLDQQLKDNFKLIIESKSEKSEIFSKLENLNVSDLEIKIAFALGSVINQALISKQGSYLTNLVIEQVKNRYQFLNQHLNPAIESDNNFTDTTKIFHDSLFNSATAENSMFLTKIAPYLQVGFMPEARSTISLSGPGAYASAYYDFINLQENTIEKTLKASDLIEFKFPENNLSQLTEQEINSLWSFDQASAKYQFEKYVRDYTGGSLSEDNEVDFNKNTALDKNYLLNNKIPSNNVEEAGSKNYVHYIIQLQGDDISYEATCNLFSKNPKNSIIIQRNMNESAKSYFLSDDGESILELNKYRIPERLKNKEKVKVTFIGHGKDEFNTSEFARLSVDSLSNEISSFLDTIKLDISPKNVEVNLLGCNMFSYDFNVEETYPGKLLLSIMDKITSTLPDVNKDSITIGANQYEVRINSEGRKELLAHSGKWINKEEAIMSDLSSKEYIFFDSIDNKLKAKSKNIPGLASISEDIKTLLLDTSVSPDTKFILNNLKLNIESSVGDYIYYEKLEPVKNIIHNSIDDLIDEFNLLENVSDELYELKKLNNLDEKYLISFEDISKNNSTYSVRFINKSNGESVYVETEKEIFSKYSEHITKEISTIKNSIITDVNGNLLDNIQLDHTSQVNTLNAAFFIQSLIDYSSNKDLLNDLSTSVKVQLYAQLFSTGLNTIYDSIQLVNLISNAVNDTINVLPTITEGIPIVSTILDGINLGAAIKELLDEHDPLLKKELEAKVGVLAINMSLSIAATVASIVGIGAEVTIFLLPIAGISAGIPSLVNNELILHDKATSVVNYFNHLSESKEYGPLKTEDDKILVPIDDLVISEIDFNNNAIKLGTCNILAMEGGSGHTVTGNIDHFFSSPSISSHIPSLSIYSAIGIKTENLDFSKKIMMLPNAPSRVFWWETGAVPGLRSLENNGTKLLDSIRDLYPGKFYWRFYAFFDYAITTLKPVYEDTNIKIKLDKDTRNFIMPTITTNEIRNKLSYSFDGAGGTYSLLLSSYPISTNINLSKDDLWIFNIDNEVREISIENGTIKKGKLIKDVLSKIDINKNKLIIGNQTIDFSGDIDNKDRYIFLTCELDDKISLIIEINLVAKSYSLLLSGDKNYLISNLSNTIEKINTLGLDSKNIAYNYTDESNNKYFGAISKTSQKSIIHYKKDSKNILEFYNGSTLEFNSKDFIAEDINVFMKDDINTITGKYYVDNNTDKSIDFSISLVSKNQAKVNGLYLNESVYSSYLDFVKNADGHHNTSNFMNLFLDNISFWKLFGFENINFVVDKYFTLVGKTNLGYVEFICDNNKNIDIYFGEWKTSSSKSTIFSGNGRNVVVEPIYNPDTGEDISTSLDFSYEPLYGIDRYINKVLIAPDLYTSLININTNYYSNEYYPEIIVLNPNTFHKKVNINLDSSSFEYKWSTEGSDFILVRYLEESNKKILQKIRIKGILSNTQSFNKMSIDFKDIKKLSLVYIMSNFKSFNSENELDRDHLGFKIIDNKTYYYDEASKLVKGLININNSLFYFDPIESNLVTGWQTINGKKYYFDINTGAALTSYKIINGKHFYFNNNGVMQLGVFKGPDRFEYFAPANTQNNNIEGQAIVYQSKFLTLNGKKYYFDNDSKAVTGWRIINNEKYYFNPNNAIAAVGLQVIDNNKYYFNPDTAIISKGWQTVNGSRYYFDTDTAIAFNGYKTIDGKHFYFDSDCVVKIGVFSGSNGFEYFAPANTYNNNIEGQAIVYQSKFLTLNGKKYYFDNNSKAVTGWQTIDSKKYYFNTNTAEAATGWQTIDGKKYYFNTNTAEAATGWQTIDGKKYYFNTNTSIASTGYTIINGKHFYFNTDGIMQIGVFKGPDGFEYFAPANTDANNIEGQAILYQNKFLTLNGKKYYFASDSKAVTGWRIINNKKYYFNPNNAIAATHLYTINNDKYYFSYDGILQNGYITIERNNFYFDANNESKMVTGVFKGPNGFEYFAPANTHNNNIEGQAIVYQNKFLTLNGKKYYFDNDSKAVTGWQTIDGKKYYFNLNTAVAVTGWQTIDGKKYYFNTNTAEAATGWQTIDGKKYYFNTNTSIASTGYTIINGKHFYFNTDGIMQIGVFKGPDGFEYFAPANTDANNIEGQAILYQNKFLTLNGKKYYFASDSKAVTGLRTIDGKKYYFNTNTAEAATGWQTINGKKYYFNTNTSIASTGYTIINGKHFYFNTDGIMQIGVFKGPDGFEYFAPANTDANNIEGQAIRYQNRFLYLHDNIYYFGNNSKAATGWVTIDGRRYYFEPNTAIGANGYKIIDNKNFYFRNGLPQIGVFKGPNGFEYFAPANTDANNIDGQAIRYQNRFLHLLGNIYYFGNNSKAVTGWQTINGNMYYFMPDTAMAAAGGLFEIDGVIYFFGVDGVKAPGIYG

SEQ ID NO: 170 - protein, 2710 aa, Clostridium difficile
MSLISKEELIKLAYSIRPRENEYKTILTNLDEYNKLTTNNNENKYLQLKKLNESIDVFMNKYKNSSRNRALSNLKKDILKEVILIKNSNTSPVEKNLHFVWIGGEVSDIALEYIKQWADINAEYNIKLWYDSEAFLVNTLKKAIVESSTTEALQLLEEEIQNPQFDNMKFYKKRMEFIYDRQKRFVNYYKSQINKPTVPTIDDIIKSHLVSEYNRDETLLESYRTNSLRKINSNHGIDIRANSLFTEQELLNIYSQELLNRGNLAAASDIVRLLALKNFGGVYLDVDMLPGIHSDLFKTISRPSSIGLDRWEMIKLEAIMKYKKYINNYTSENFDKLDQQLKDNFKLIIESKSEKSEIFSKLENLNVSDLEIKIAFALGSVINQALISKQGSYLTNLVIEQVKNRYQFLNQHLNPAIESDNNFTDTTKIFHDSLFNSATAENSMFLTKIAPYLQVGFMPEARSTISLSGPGAYASAYYDFINLQENTIEKTLKASDLIEFKFPENNLSQLTEQEINSLWSFDQASAKYQFEKYVRDYTGGSLSEDNEVDFNKNTALDKNYLLNNKIPSNNVEEAGSKNYVHYIIQLQGDDISYEATCNLFSKNPKNSIIIQRNMNESAKSYFLSDDGESILELNKYRIPERLKNKEKVKVTFIGHGKDEFNTSEFARLSVDSLSNEISSFLDTIKLDISPKNVEVNLLGCNMFSYDFNVEETYPGKLLLSIMDKITSTLPDVNKDSITIGANQYEVRINSEGRKELLAHSGKWINKEEAIMSDLSSKEYIFFDSIDNKLKAKSKNIPGLASISEDIKTLLLDTSVSPDTKFILNNLKLNIESSVGDYIYYEKLEPVKNIIHNSIDDLIDEFNLLENVSDELYELKKLNNLDEKYLISFEDISKNNSTYSVRFINKSNGESVYVETEKEIFSKYSEHITKEISTIKNSIITDVNGNLLDNIQLDHTSQVNTLNAAFFIQSLIDYSSNKDLLNDLSTSVKVQLYAQLFSTGLNTIYDSIQLVNLISNAVNDTINVLPTITEGIPIVSTILDGINLGAAIKELLDEHDPLLKKELEAKVGVLAINMSLSIAATVASIVGIGAEVTIFLLPIAGISAGIPSLVNNELILHDKATSVVNYFNHLSESKEYGPLKTEDDKILVPIDDLVISEIDFNNNAIKLGTCNILAMEGGSGHTVTGNIDHFFSSPSISSHIPSLSIYSAIGIKTENLDFSKKIMMLPNAPSRVFWWETGAVPGLRSLENNGTKLLDSIRDLYPGKFYWRFYAFFDYAITTLKPVYEDTNIKIKLDKDTRNFIMPTITTNEIRNKLSYSFDGAGGTYSLLLSSYPISTNINLSKDDLWIFNIDNEVREISIENGTIKKGKLIKDVLSKIDINKNKLIIGNQTIDFSGDIDNKDRYIFLTCELDDKISLIIEINLVAKSYSLLLSGDKNYLISNLSNTIEKINTLGLDSKNIAYNYTDESNNKYFGAISKTSQKSIIHYKKDSKNILEFYNGSTLEFNSKDFIAEDINVFMKDDINTITGKYYVDNNTDKSIDFSISLVSKNQAKVNGLYLNESVYSSYLDFVKNADGHHNTSNFMNLFLDNISFWKLFGFENINFVVDKYFTLVGKTNLGYVEFICDNNKNIDIYFGEWKTSSSKSTIFSGNGRNVVVEPIYNPDTGEDISTSLDFSYEPLYGIDRYINKVLIAPDLYTSLININTNYYSNEYYPEIIVLNPNTFHKKVNINLDSSSFEYKWSTEGSDFILVRYLEESNKKILQKIRIKGILSNTQSFNKMSIDFKDIKKLSLVYIMSNFKSFNSENELDRDHLGFKIIDNKTYYYDEASKLVKGLININNSLFYFDPIESNLVTGWQTINGKKYYFDINTGAALTSYKIINGKHFYFNNNGVMQLGVFKGPDRFEYFAPANTQNNNIEGQAIVYQSKFLTLNGKKYYFDNDSKAVTGWRIINNEKYYFNPNNAIAAVGLQVIDNNKYYFNPDTAIISKGWQTVNGSRYYFDTDTAIAFNGYKTIDGKHFYFDSDCVVKIGVFSGSNGFEYFAPANTYNNNIEGQAIVYQSKFLTLNGKKYYFDNNSKAVTGWQTIDSKKYYFNTNTAEAATGWQTIDGKKYYFNTNTAEAATGWQTIDGKKYYFNTNTSIASTGYTIINGKHFYFNTDGIMQIGVFKGPNGFEYFAPANTDANNIEGQAILYQNKFLTLNGKKYYFASDSKAVTGWRIINNKKYYFNPNNAIAATHLYTINNDKYYFSYDGILQNGYITIERNNFYFDANNESKMVTGVFKGPNGFEYFAPANTHNNNIEGQAIVYQNKFLTLNGKKYYFDNDSKAVTGWQTIDGKKYYFNLNTAVAVTGWQTIDGKKYYFNTNTAEAATGWQTIDGKKYYFNTNTSIASTGYTIINGKHFYFNTDGIMQIGVFKGPDGFEYFAPANTDANNIEGQAILYQNKFLTLNGKKYYFASDSKAVTGLRTIDGKKYYFNTNTAEAATGWQTIDGKKYYFNTNTSIASTGYTIINDKHFYFNTDGIMQIGVFKGPDGFEYFAPANTDANNIEGQAIRYQNRFLYLHDNIYYFGNNSKAATGWVTIDGRRYYFEPNTAIGANGYKIIDNKNFYFRNGLPQIGVFKGPNGFEYFAPANTDANNIDGQAIRYQNRFLHLLGNIYYFGNNSKAVTGWQTINGNMYYFMPDTAMAAAGGLFEIDGVIYFFGVDGVKAPGIYG

SEQ ID NO: 171 - protein, 2710 aa, Clostridium difficile
MSLISKEELIKLAYSIRPRENEYKTILTNLDEYNKLTTNNNENKYLQLKKLNESIDVFMNKYKNSSRNRALSNLKKDILKEVILIKNSNTSPVEKNLHFVWIGGEVSDIALEYIKQWADINAEYNIKLWYDSEAFLVNTLKKAIVESSTTEALQLLEEEIQNPQFDNMKFYKKRMEFIYDRQKRFVNYYKSQINKPTVPTIDDIIKSHLVSEYNRDETLLESYRTNSLRKINSNHGIDIRANSLFTEQELLNIYSQELLNRGNLAAASDIVRLLALKNFGGVYLDVDMLPGIHSDLFKTISRPSSIGLDRWEMIKLEAIMKYKKYINNYTSENFDKLDQQLKDNFKLIIESKSEKSEIFSKLENLNVSDLEIKIAFALGSVINQALISKQGSYLTNLVIEQVKNRYQFLNQHLNPAIESDNNFTDTTKIFHDSLFNSATAENSMFLTKIAPYLQVGFMPEARSTISLSGPGAYASAYYDFINLQENTIEKTLKASDLIEFKFPENNLSQLTEQEINSLWSFDQASAKYQFEKYVRDYTGGSLSEDNEVDFNKNTALDKNYLLNNKIPSNNVEEAGSKNYVHYIIQLQGDDISYEATCNLFSKNPKNSIIIQRNMNESAKSYFLSDDGESILELNKYRIPERLKNKEKVKVTFIGHGKDEFNTSEFARLSVDSLSNEISSFLDTIKLDISPKNVEVNLLGCNMFSYDFNVEETYPGKLLLSIMDKITSTLPDVNKDSITIGANQYEVRINSEGRKELLAHSGKWINKEEAIMSDLSSKEYIFFDSIDNKLKAKSKNIPGLASISEDIKTLLLDTSVSPDTKFILNNLKLNIESSVGDYIYYEKLEPVKNIIHNSIDDLIDEFNLLENVSDELYELKKLNNLDEKYLISFEDISKNNSTYSVRFINKSNGESVYVETEKEIFSKYSEHITKEISTIKNSIITDVNGNLLDNIQLDHTSQVNTLNAAFFIQSLIDYSSNKDLLNDLSTSVKVQLYAQLFSTGLNTIYDSIQLVNLISNAVNDTINVLPTITEGIPIVSTILDGINLGAAIKELLDEHDPLLKKELEAKVGVLAINMSLSIAATVASIVGIGAEVTIFLLPIAGISAGIPSLVNNELILHDKATSVVNYFNHLSESKEYGPLKTEDDKILVPIDDLVISEIDFNNNAIKLGTCNILAMEGGSGHTVTGNIDHFFSSPSISSHIPSLSIYSAIGIKTENLDFSKKIMMLPNAPSRVFWWETGAVPGLRSLENNGTKLLDSIRDLYPGKFYWRFYAFFDYAITTLKPVYEDTNIKIKLDKDTRNFIMPTITTNEIRNKLSYSFDGAGGTYSLLLSSYPISTNINLSKDDLWIFNIDNEVREISIENGTIKKGKLIKDVLSKIDINKNKLIIGNQTIDFSGDIDNKDRYIFLTCELDDKISLIIEINLVAKSYSLLLSGDKNYLISNLSNTIEKINTLGLDSKNIAYNYTDESNNKYFGAISKTSQKSIIHYKKDSKNILEFYNGSTLEFNSKDFIAEDINVFMKDDINTITGKYYVDNNTDKSIDFSISLVSKNQAKVNGLYLNESVYSSYLDFVKNADGHHNTSNFMNLFLDNISFWKLFGFENINFVVDKYFTLVGKTNLGYVEFICDNNKNIDIYFGEWKTSSSKSTIFSGNGRNVVVEPIYNPDTGEDISTSLDFSYEPLYGIDRYINKVLIAPDLYTSLININTNYYSNEYYPEIIVLNPNTFHKKVNINLDSSSFEYKWSTEGSDFILVRYLEESNKKILQKIRIKGILSNTQSFNKMSIDFKDIKKLSLVYIMSNFKSFNSENELDRDHLGFKIIDNKTYYYDEASKLVKGLININNSLFYFDPIESNLVTGWQTINGKKYYFDINTGAALTSYKIINGKHFYFNNNGVMQLGVFKGPDRFEYFAPANTQNNNIEGQAIVYQSKFLTLNGKKYYFDNDSKAVTGWRIINNEKYYFNPNNAIAAVGLQVIDNNKYYFNPDTAIISKGWQTVNGSRYYFDTDTAIAFNGYKTIDGKHFYFDSDCVVKIGVFSGSNGFEYFAPANTYNNNIEGQAIVYQSKFLTLNGKKYYFDNNSKAVTGWQTIDSKKYYFNTNTAEAATGWQTIDGKKYYFNTNTAEAATGWQTIDGKKYYFNTNTSIASTGYTIINGKHFYFNTDGIMQIGVFKGPDGFEYFAPANTDANNIEGQAILYQNKFLTLNGKKYYFASDSKAVTGWRIINNKKYYFNPNNAIAATHLYTINNDKYYFSYDGILQNGYITIERNNFYFDANNESKMVTGVFKGPNGFEYFAPANTHNNNIEGQAIVYQNKFLTLNGKKYYFDNDSKAVTGWQTIDGKKYYFNLNTAVAVTGWQTIDGKKYYFNTNTAEAATGWQTIDGKKYYFNTNTSIASTGYTIINGKHFYFNTDGIMQIGVFKGPDGFEYFAPANTDANNIEGQAILYQNKFLTLNGKKYYFASDSKAVTGLRTIDGKKYYFNTNTAEAATGWQTIDGKKYYFNTNTSIASTGYTIINDKHFYFNTDGIMQIGVFKGPDGFEYFAPANTDANNIEGQAIRYQNRFLYLHDNIYYFGNNSKAATGWVTIDGRRYYFEPNTAIGANGYKIIDNKNFYFRNGLPQIGVFKGPNGFEYFAPANTDANNIDGQAIRYQNRFLHLLGNIYYFGNNSKAVTGWQTINGNMYYFMPDTAMAAAGGLFEIDGVIYFFGVDGVKAPGIYG

SEQ ID NO: 172 - protein, 2710 aa, Clostridium difficile; identical to SEQ ID NO: 171

SEQ ID NO: 173 - protein, 2366 aa, Clostridium difficile; identical to SEQ ID NO: 115

SEQ ID NO: 174 - protein, 2366 aa, Clostridium difficile
MSLVNRKQLEKMANVRFRTQEDEYVAILDALEEYHNMSENTVVEKYLKLKDINSLTDIYIDTYKKSGRNKALKKFKEYLVTEVLELKNNNLTPVEKNLHFVWIGGQINDTAINYINQWKDVNSDYNVNVFYDSNAFLINTLKKTIVESAINDTLESFRENLNNPRFDYNKFFRKRMEIIYDKQKNFINYYKAQREENPELIIDDIVKIYLSNEYSKEIDELNTYIEESLNKIKQNSGNDVRNFEEFKNGESFKLYEQELVERWNLAAASDILRISALKEIGGMYLDVDMLPGIQPDLFESIEKPSSVTVDFWEMTKLEAIMKYKEYIPGYTSEHFDMLDEEVQSSFESALASKSDKSEIFSSLGDMEASPLEVKIAFNSKGIINQGLISVKDSYCSNLIVKQIENRYKILNNSLNPAISEDNDFNTTTNTFIDSIMAEANADNGRFMMELGKYLRVGFFPDVKTTVNLSGPEAYAAAYQDLLMFKEGSMNIHLIEADLRNFEISKTNISQSTEQEMASLWTFDDARAKVQFEEYKRNYFEGSLGEDDNLDFSQNIVVDKEYLLEKISSLARSSERGYIHYIVQLQGDKISYEAACNLFAKTPYDSILFQKNIENSEVAYYYNPGDGEIQEIDKYRIPSIISDRPKIKLTFIGHGKDEFNTDIFAGLDVDSLSTEIETAIDLAKEDISSKSIEINLLGCNMFSYSINVEETYPGKLLLKVKDKISELMPSISQDSIIVSANQYEVRINNEGRRELLDHSGEWINKEESIIKDISSKEYISFNPKENKITVKSKNLPELSTLLQEIRNNSNLSDIELEEKVMLAECEINVISNIDTQIVEERIEEAKNLTSDSINYIKNEFKLIESISDSLYDLKQQNELDDSHFISFEDISKTEDGFSIRFINKETGESIFVETEKEIFSEYANHIRREISNIKDTIFDTVNGKLVKKVNLDAIHEVNTLNAAFFIQSLIGYSSSKESLSNLSVAMKVQVYAQLFSTGLNTITDAAKVVELVSTALDETIDLLPTLSEGLPVIATIIDGVSLGAAIKELSETSDPLLRQEIEAKIGIMAVNLTAATTAIITSSLGIASGFSILLVPLAGISAGIPSLVNNELVLRDKATKVVDYFKHISLVETEGAFTLLDDKIMIPQDDLVISEIDFNNNSIVLGKCEIWRMEGGSGHTVTNDIDHFFSSPTITYIKPHLSIYDVLEVQKEELDLSKDLMVLPNAPNRVFAWETGWTPGLRSLENEGTKLLDRIRDHYKGEFYWRYFAFIADALITTLKPRYEDTNIRINLDSNNRSFIVPIITTEHIREKLSYSFHGSGGTYALSLSQYNMGINIELSESDVWIIDVDNVVRDVTIDSDKIKKGDLIEGILSTLSIEDNKIILNHHEINFSGDVNGSNGFISLTFSILEGINAIIEVDLLSKSYKLLISGELKILMLNSNHIQQKIDYIGFNSELQKNIPYSFVDSEGKENGFINGSTKEGLFVSELPDVVLISKVYMDDSKPSFGYYSNNLKDVKVITKDNVNILTGYYLKDDIKISLSFTLQDEKTIKLNGVHLDESGVAEILKFMNKKGSTNTSDSLMSFLESVNIKSIFVNFLQSKINFILDANFIISGTTSIGQFEFICDENDNIQPYFIKFNTLETTYTLYVGNRQNMIVEPNYDLDDSGDISSTVINFSQKYLYGIDSCVNKVVISPNIYTDEINITPVYETNNNYPEVIVLDANYINEKINVNINDLSIRYVWSNDGNDFILMSTSEENKVSQVKIRFVNVFKDKTLANKLSFNFSDKQDVPVSEIISAFTPSYYEDGLIGYDLGLVSLYNEKFYINNFGMMVSGLIYINDSLYYFKPPVNNLITGFVTVGDDKYYFNPTNGGAASIGETIINDKNYYFNQSGILQTGVFSTEDGLKYFAPANTLDENLEGEAIDFTGKLIIDENIYYFEDNYRGAVEWKELDGEMYYFSPETGKAFKGLNQIGDDKYYFNSDGIMQKGFVSINDKKYYFDDSGVMKVGYIEIDGKYFYFAENGEMQIGVFNTSDGFKYFAHHNEDLGNEEGEAISYSGILNFNNKIYYFDYSFTAVVGWKDLEDGSKYYFDEDTAEAYVGLSLINDGQYYFNDDGIMQVGFVTINNKVFYFSDSGIIESGVQNIDDNYFYIDEKGIVQIGVFDTSDEYKYFAPANTVNDNIYGQAVDYSGLVRVGEDIYYFGETYTIETGWIYDMENESDKYYFNPETKKACKGINLIDDIKYYFDENGIMRTGLISFENNDYYFNENGEMQFGYINIEDKMFYFGEDGVMQIGVFNTQDGFKYFAHQNTLDENFEGESINYTGWLDLDEKRYYFTDEYIAATGSVIIDGEEYYFDPDTAQLVISE

SEQ ID NO: 175 - protein, 2366 aa, Clostridium difficile; identical to SEQ ID NO: 174

SEQ ID NO: 176 - protein, 2366 aa, Clostridium difficile; identical to SEQ ID NO: 174

SEQ ID NO: 177 - protein, 2366 aa, Clostridium difficile; identical to SEQ ID NO: 174

SEQ ID NO: 178 - protein, 2710 aa, Clostridium difficile
MSLISKEELIKLAYSIRPRENEYKTILTNLDEYNKLTTNNNENKYLQLKKLNESIDVFMNKYKTSSRNRALSNLKKDILKEVILIKNSNTSPVEKNLHFVWIGGEVSDIALEYIKQWADINAEYNIKLWYDSEAFLVNTLKKAIVESSTTEALQLLEEEIQNPQFDNMKFYKKRMEFIYDRQKRFINYYKSQINKPTVPTIDDIIKSHLVSEYNRDETLLESYRTNSLRKINSNHGIDIRANSLFTEQELLNIYSQELLNRGNLAAASDIVRLLALKNFGGVYLDVDMLPGIHSDLFKTISRPSSIGLDRWEMIKLEAIMKYKKYINNYTSENFDKLDQQLKDNFKLIIESKSEKSEIFSKLENLNVSDLEIKIAFALGSVINQALISKQGSYLTNLVIEQVKNRYQFLNQHLNPAIESDNNFTDTTKIFHDSLFNSATAENSMFLTKIAPYLQVGFMPEARSTISLSGPGAYASAYYDFINLQENTIEKTLKASDLIEFKFPENNLSQLTEQEINSLWSFDQASAKYQFEKYVRDYTGGSLSEDNGVDFNKNTALDKNYLLNNKIPSNNVEEAGSKNYVHYIIQLQGDDISYEATCNLFSKNPKNSIIIQRNMNESAKSYFLSDDGESILELNKYRIPERLKNKEKVKVTFIGHGKDEFNTSEFARLSVDSLSNEISSFLDTIKLDISPKNVEVNLLGCNMFSYDFNVEETYPGKLLLSIMDKITSTLPDVNKNSITIGANQYEVRINSEGRKELLAHSGKWINKEEAIMSDLSSKEYIFFDSIDNKLKAKSKNIPGLASISEDIKTLLLDASVSPDTKFILNNLKLNIESSIGDYIYYEKLEPVKNIIHNSIDDLIDEFNLLENVSDELYELKKLNNLDEKYLISFEDISKNNSTYSVRFINKSNGESVYVETEKEIFSKYSEHITKEISTIKNSIITDVNGNLLDNIQLDHTSQVNTLNAAFFIQSLIDYSSNKDVLNDLSTSVKVQLYAQLFSTGLNTIYDSIQLVNLISNAVNDTINVLPTITEGIPIVSTILDGINLGAAIKELLDEHDPLLKKELEAKVGVLAINMSLSIAATVASIVGIGAEVTIFLLPIAGISAGIPSLVNNELILHDKATSVVNYFNHLSESKKYGPLKTEDDKILVPIDDLVISEIDFNNNSIKLGTCNILAMEGGSGHTVTGNIDHFFSSPSISSHIPSLSIYSAIGIETENLDFSKKIMMLPNAPSRVFWWETGAVPGLRSLENDGTRLLDSIRDLYPGKFYWRFYAFFDYAITTLKPVYEDTNIKIKLDKDTRNFIMPTITTNEIRNKLSYSFDGAGGTYSLLLSSYPISTNINLSKDDLWIFNIDNEVREISIENGTIKKGKLIKDVLSKIDINKNKLIIGNQTIDFSGDIDNKDRYIFLTCELDDKISLIIEINLVAKSYSLLLSGNKNYLISNLSNTIEKINTLGLDSKNIAYNYTDESNNKYFGAISKTSQKSIIHYKKDSKNILEFYNDSTLEFNSKDFIAEDINVFMKDDINTITGKYYVDNNTDKGIDFSISLVSKNQVKVNGLYLNESVYSSYLDFVKNSDGHHNTSNFMNLFLDNISFWKLFGFENINFVIDKYFTLVGKTNLGYVEFICDNNKNIDIYFGEWKTSSSKSTIFSGNGRNVVVEPIYNPDTGEDISTSLDFSYEPLYGIDRYINKVLIAPDLYTSLININTNYYSNEYYPEIIVLNPNTFHKKVNINLDSSSFEYKWSTEGSDFILVRYLEESNKKILQKIRIKGILSNTQSFNKMSIDFKDIKKLSLGYIMSNFKSFNSENELDRDHLGFKIIDNKTYYYDEDSKLVKGLININNSLFYFDPIEFNLVTGWQTINGKKYYFDINTGAALTSYKIINGKHFYFNNDGVMQLGVFKGPDGFEYFAPANTQNNNIEGQAIVYQSKFLTLNGKKYYFDNDSKAVTGWRIINNEKYYFNPNNAIAAVGLQVIDNNKYYFNPDTAIISKGWQTVNGSRYYFDTDTAIAFNGYKTIDGKHFYFDSDCVVKIGVFSTSNGFEYFAPANTYNNNIEGQAIVYQSKFLTLNGKKYYFDNNSKAVTGWQTIDSKKYYFNTNTAEAATGWQTIDGKKYYFNTNTAEAATGWQTIDGKKYYFNTNTAIASTGYTIINGKHFYFNTDGIMQIGVFKGPNGFEYFAPANTDANNIEGQAILYQNEFLTLNGKKYYFGSDSKAVTGWRIINNKKYYFNPNNAIAAIHLCTINNDKYYFSYDGILQNGYITIERNNFYFDANNESKMVTGVFKGPNGFEYFAPANTHNNNIEGQAIVYQNKFLTLNGKKYYFDNDSKAVTGWQTIDGKKYYFNLNTAEAATGWQTIDGKKYYFNLNTAEAATGWQTIDGKKYYFNTNTFIASTGYTSINGKHFYFNTDGIMQIGVFKGPNGFEYFAPANTHNNNIEGQAILYQNKFLTLNGKKYYFGSDSKAVTGLRTIDGKKYYFNTNTAVAVTGWQTINGKKYYFNTNTSIASTGYTIISGKHFYFNTDGIMQIGVFKGPDGFEYFAPANTDANNIEGQAIRYQNRFLYLHDNIYYFGNNSKAATGWVTIDGNRYYFEPNTAMGANGYKTIDNKNFYFRNGLPQIGVFKGSNGFEYFAPANTDANNIEGQAIRYQNRFLHLLGKIYYFGNNSKAVTGWQTINGKVYYFMPDTAMAAAGGLFEIDGVIYFFGVDGVKAPGIYG

SEQ ID NO: 179 - protein, 2366 aa, Clostridium difficile
MSLVNRKQLEKMANVRFRTQEDEYVAILDALEEYHNMSENTVVEKYLKLKDINSLTDIYIDTYKKSGRNKALKKFKEYLVTEVLELKNNNLTPVEKNLHFVWIGGQINDTAINYINQWKDVNSDYNVNVFYDSNAFLINTLKKTVVESAINDTLESFRENLNDPRFDYNKFFRKRMEIIYDKQKNFINYYKAQREENPELIIDDIVKTYLSNEYSKEIDELNTYIEESLNKITQNSGNDVRNFEEFKNGESFNLYEQELVERWNLAAASDILRISALKEIGGMYLDVDMLPGIQPDLFESIEKPSSVTVDFWEMTKLEAIMKYKEYIPEYTSEHFDMLDEEVQSSFESVLASKSDKSEIFSSLGDMEASPLEVKIAFNSKGIINQGLISVKDSYCSNLIVKQIENRYKILNNSLNPAISEDNDFNTTTNTFIDSIMAEANADNGRFMMELGKYLRVGFFPDVKTTINLSGPEAYAAAYQDLLMFKEGSMNIHLIEADLRNFEISKTNISQSTEQEMASLWSFDDARAKAQFEEYKRNYFEGSLGEDDNLDFSQNIVVDKEYLLEKISSLARSSERGYIHYIVQLQGDKISYEAACNLFAKTPYDSVLFQKNIEDSEIAYYYNPGDGEIQEIDKYKIPSIISDRPKIKLTFIGHGKDEFNTDIFAGFDVDSLSTEIEAAIDLAKEDISPKSIEINLLGCNMFSYSINVEETYPGKLLLKVKDKISELMPSISQDSIIVSANQYEVRINSEGRRELLDHSGEWINKEESIIKDISSKEYISFNPKENKITVKSKNLPELSTLLQEIRNNSNSSDIELEEKVMLTECEINVISNIDTQIVEERIEEAKNLTSDSINYIKDEFKLIESISDALCDLKQQNELEDSHFISFEDISETEEGFSIRFINKETGESIFVETEKTIFSEYANHITEEISKIKGTIFDTVNGKLVKKVNLDTTHEVNTLNAAFFIQSLIEYNSSKESLSNLSVAMKVQVYAQLFSTGLNTITDAAKVVELVSTALDETIDLLPTLSEGLPIIATIIDGVSLGAAIKELSETSDPLLRQEIEAKIGIMAVNLTTATTAIITSSLGIASGFSILLVPLAGISAGIPSLVNNELVLRDKATKVVDYFKHVSLVETEGVFTLLDDKIMMPQDDLVISEIDFNNNSIVLGKCEIWRMEGGSGHTVTDDIDHFFSAPSITYREPHLSIYDVLEVQKEELDLSKDLMVLPNAPNRVFAWETGWTPGLRSLENDGTKLLDRIRDNYEGEFYWRYFAFIADALITTLKPRYEDTNIRINLDSNTRSFIVPIITTEYIREKLSYSFYGSGGTYALSLSQYNMGINIELSESDVWIIDVDNVVRDVTIESDKIKKGDLIEGILSTLSIEENKIILNSHEINFSGEVNGSNGFVSLTFSILEGINAIIEVDLLSKSYKLLISGELKILMLNSNHIQQKIDYIGFNSELQKNIPYSFVDSEGKENGFINGSTKEGLFVSELPDVVLISKVYMDDSKPSFGYYSNNLKDVKVITKDNVNILTGYYLKDDIKISLSLTLQDEKTIKLNSVHLDESGVAEILKFMNRKGNTNTSDSLMSFLESMNIKSIFVNFLQSNIKFILDANFIISGTTSIGQFEFICDENDNIQPYFIKFNTLETNYTLYVGNRQNMIVEPNYDLDDSGDISSTVINFSQKYLYGIDSCVNKVVISPNIYTDEINITPVYETNNTYPEVIVLDANYINEKINVNINDLSIRYVWSNDGNDFILMSTSEENKVSQVKIRFVNVFKDKTLANKLSFNFSDKQDVPVSEIILSFTPSYYEDGLIGYDLGLVSLYNEKFYINNFGMMVSGLIYINDSLYYFKPPVNNLITGFVTVGDDKYYFNPINGGAASIGETIIDDKNYYFNQSGVLQTGVFSTEDGFKYFAPANTLDENLEGEAIDFTGKLIIDENIYYFEDNYRGAVEWKELDGEMHYFSPETGKAFKGLNQIGDDKYYFNSDGVMQKGFVSINDNKHYFDDSGVMKVGYTEIDGKYFYFAENGEMQIGVFNTEDGFKYFAHHNEDLGNEEGEEISYSGILNFNNKIYYFDDSFTAVVGWKDLEDGSKYYFDEDTAEAYIGLSLINDGQYYFNDDGIMQVGFVTINDKVFYFSDSGIIESGVQNIDDNYFYIDDNGIVQIGVFDTSDGYKYFAPANTVNDNIYGQAVEYSGLVRVGEDVYYFGETYTIETGWIYDMENESDKYYFNPETKKACKGINLIDDIKYYFDEKGIMRTGLISFENNNYYFNENGEMQFGYINIEDKMFYFGEDGVMQIGVFNTPDGFKYFAHQNTLDENFEGESINYTGWLDLDEKRYYFTDEYIAATGSVIIDGEEYYFDPDTAQLVISE

SEQ ID NO: 180 - protein, 2710 aa, Clostridium difficile; identical to SEQ ID NO: 95

SEQ ID NO: 181 - protein, 2366 aa, Clostridium difficile; identical to SEQ ID NO: 116

SEQ ID NO: 182 - protein, 2367 aa, Clostridium difficile; identical to SEQ ID NO: 121

SEQ ID NO: 183 - protein, 2709 aa, Artificial Sequence
  Synthetic amino acid sequence
SLISKEELIKLAYSIRPRENEYKTILTNLDEYNKLTTNNNENKYLQLKKLNESIDVFMNKYKTSSRNRALSNLKKDILKEVILIKNSNTSPVEKNLHFVWIGGEVSDIALEYIKQWADINAEYNIKLWYDSEAFLVNTLKKAIVESSTTEALQLLEEEIQNPQFDNMKFYKKRMEFIYDRQKRFINYYKSQINKPTVPTIDDIIKSHLVSEYNRDETVLESYRTNSLRKINSNHGIDIRANSLFTEQELLNIYSQELLNRGNLAAASDIVRLLALKNFGGVYLAVAMLPGIHSDLFKTISRPSSIGLDRWEMIKLEAIMKYKKYINNYTSENFDKLDQQLKDNFKLIIESKSEKSEIFSKLENLNVSDLEIKIAFALGSVINQALISKQGSYLTNLVIEQVKNRYQFLNQHLNPAIESDNNFTDTTKIFHDSLFNSATAENSMFLTKIAPYLQVGFMPEARSTISLSGPGAYASAYYDFINLQENTIEKTLKASDLIEFKFPENNLSQLTEQEINSLWSFDQASAKYQFEKYVRDYTGGSLSEDNGVDFNKNTALDKNYLLNNKIPSNNVEEAGSKNYVHYIIQLQGDDISYEATCNLFSKNPKNSIIIQRNMNESAKSYFLSDDGESILELNKYRIPERLKNKEKVKVTFIGHGKDEFNTSEFARLSVDSLSNEISSFLDTIKLDISPKNVEVNLLGANMFSYDFNVEETYPGKLLLSIMDKITSTLPDVNKNSITIGANQYEVRINSEGRKELLAHSGKWINKEEAIMSDLSSKEYIFFDSIDNKLKAKSKNIPGLASISEDIKTLLLDASVSPDTKFILNNLKLNIESSIGDYIYYEKLEPVKNIIHNSIDDLIDEFNLLENVSDELYELKKLNNLDEKYLISFEDISKNNSTYSVRFINKSNGESVYVETEKEIFSKYSEHITKEISTIKNSIITDVNGNLLDNIQLDHTSQVNTLNAAFFIQSLIKYSSNKKVLNDLSTSVKVQLYAQLFSTGLNTIYDSIQLVNLISNAVNDTINVLPTITEGIPIVSTILDGINLGAAIKELLDEHDPLLKKELEAKVGVLAINMSLSIAATVASIVGIGAEVTIFLLPIAGISAGIPSLVNNELILHDKATSVVNYFNHLSESKKYGPLKTEDDKILVPIDDLVISEIDFNNNSIKLGTCNILAMEGGSGHTVTGNIDHFFSSPSISSHIPSLSIYSAIGIETENLDFSKKIMMLPNAPSRVFWWETGAVPGLRSLENDGTRLLDSIRDLYPGKFYWRFYAFFDYAITTLKPVYEDTNIKIKLDKDTRNFIMPTITTNEIRNKLSYSFDGAGGTYSLLLSSYPISTNINLSKDDLWIFNIDNEVREISIENGTIKKGKLIKDVLSKIDINKNKLIIGNQTIDFSGDIDNKDRYIFLTCELDDKISLIIEINLVAKSYSLLLSGDKNYLISNLSNIIEKINTLGLDSKNIAYNYTDESNNKYFGAISKTSQKSIIHYKKDSKNILEFYNDSTLEFNSKDFIAEDINVFMKDDINTITGKYYVDNNTDKSIDFSISLVSKNQVKVNGLYLNESVYSSYLDFVKNSDGHHNTSNFMNLFLDNISFWKLFGFENINFVIDKYFTLVGKTNLGYVEFICDNNKNIDIYFGEWKTSSSKSTIFSGNGRNVVVEPIYNPDTGEDISTSLDFSYEPLYGIDRYINKVLIAPDLYTSLININTNYYSNEYYPEIIVLNPNTFHKKVNINLDSSSFEYKWSTEGSDFILVRYLEESNKKILQKIRIKGILSNTQSFNKMSIDFKDIKKLSLGYIMSNFKSFNSENELDRDHLGFKIIDNKTYYYDEDSKLVKGLININNSLFYFDPIEFNLVTGWQTINGKKYYFDINTGAALISYKIINGKHFYFNNDGVMQLGVFKGPDGFEYFAPANTQNNNIEGQAIVYQSKFLTLNGKKYYFDNDSKAVTGWRIINNEKYYFNPNNAIAAVGLQVIDNNKYYFNPDTAIISKGWQTVNGSRYYFDTDTAIAFNGYKTIDGKHFYFDSDCVVKIGVFSTSNGFEYFAPANTYNNNIEGQAIVYQSKFLTLNGKKYYFDNNSKAVTGWQTIDSKKYYFNTNTAEAATGWQTIDGKKYYFNTNTAEAATGWQTIDGKKYYFNTNTAIASTGYTIINGKHFYFNTDGIMQIGVFKGPNGFEYFAPANTDANNIEGQAILYQNEFLTLNGKKYYFGSDSKAVTGWRIINNKKYYFNPNNAIAAIHLCTINNDKYYFSYDGILQNGYITIERNNFYFDANNESKMVTGVFKGPNGFEYFAPANTHNNNIEGQAIVYQNKFLTLNGKKYYFDNDSKAVTGWQTIDGKKYYFNLNTAEAATGWQTIDGKKYYFNLNTAEAATGWQTIDGKKYYFNTNTFIASTGYTSINGKHFYFNTDGIMQIGVFKGPNGFEYFAPANTHNNNIEGQAILYQNKFLTLNGKKYYFGSDSKAVTGLRTIDGKKYYFNTNTAVAVTGWQTINGKKYYFNTNTSIASTGYTIISGKHFYFNTDGIMQIGVFKGPDGFEYFAPANTDANNIEGQAIRYQNRFLYLHDNIYYFGNNSKAATGWVTIDGNRYYFEPNTAMGANGYKTIDNKNFYFRNGLPQIGVFKGSNGFEYFAPANTDANNIEGQAIRYQNRFLHLLGKIYYFGNNSKAVTGWQTINGKVYYFMPDTAMAAAGGLFEIDGVIYFFGVDGVKAPGIYG

SEQ ID NO: 184 - protein, 2365 aa, Artificial Sequence
  Synthetic amino acid sequence
SLVNRKQLEKMANVRFRTQEDEYVAILDALEEYHNMSENTVVEKYLKLKDINSLTDIYIDTYKKSGRNKALKKFKEYLVTEVLELKNNNLTPVEKNLHFVWIGGQINDTAINYINQWKDVNSDYNVNVFYDSNAFLINTLKKTVVESAINDTLESFRENLNDPRFDYNKFFRKRMEIIYDKQKNFINYYKAQREENPELIIDDIVKTYLSNEYSKEIDELNTYIEESLNKITQNSGNDVRNFEEFKNGESFNLYEQELVERWNLAAASDILRISALKEIGGMYLAVAMLPGIQPDLFESIEKPSSVTVDFWEMTKLEAIMKYKEYIPEYTSEHFDMLDEEVQSSFESVLASKSDKSEIFSSLGDMEASPLEVKIAFNSKGIINQGLISVKDSYCSNLIVKQIENRYKILNNSLNPAISEDNDFNTTTNTFIDSIMAEANADNGRFMMELGKYLRVGFFPDVKTTINLSGPEAYAAAYQDLLMFKEGSMNIHLIEADLRNFEISKTNISQSTEQEMASLWSFDDARAKAQFEEYKRNYFEGSLGEDDNLDFSQNIVVDKEYLLEKISSLARSSERGYIHYIVQLQGDKISYEAACNLFAKTPYDSVLFQKNIEDSEIAYYYNPGDGEIQEIDKYKIPSIISDRPKIKLTFIGHGKDEFNTDIFAGFDVDSLSTEIEAAIDLAKEDISPKSIEINLLGANMFSYSINVEETYPGKLLLKVKDKISELMPSISQDSIIVSANQYEVRINSEGRRELLDHSGEWINKEESIIKDISSKEYISFNPKENKITVKSKNLPELSTLLQEIRNNSNSSDIELEEKVMLTECEINVISNIDTQIVEERIEEAKNLTSDSINYIKDEFKLIESISDALCDLKQQNELEDSHFISFEDISETDEGFSIRFINKETGESIFVETEKTIFSEYANHITEEISKIKGTIFDTVNGKLVKKVNLDTTHEVNTLNAAFFIQSLIKYNSSKKSLSNLSVAMKVQVYAQLFSTGLNTITDAAKVVELVSTALDETIDLLPTLSEGLPIIATIIDGVSLGAAIKELSETSDPLLRQEIEAKIGIMAVNLTTATTAIITSSLGIASGFSILLVPLAGISAGIPSLVNNELVLRDKATKVVDYFKHVSLVETEGVFTLLDDKIMMPQDDLVISEIDFNNNSIVLGKCEIWRMEGGSGHTVTDDIDHFFSAPSITYREPHLSIYDVLEVQKEELDLSKDLMVLPNAPNRVFAWETGWTPGLRSLENDGTKLLDRIRDNYEGEFYWRYFAFIADALITTLKPRYEDTNIRINLDSNTRSFIVPIITTEYIREKLSYSFYGSGGTYALSLSQYNMGINIELSESDVWIIDVDNVVRDVTIESDKIKKGDLIEGILSTLSIEENKIILNSHEINFSGEVNGSNGFVSLTFSILEGINAIIEVDLLSKSYKLLISGELKILMLNSNHIQQKIDYIGFNSELQKNIPYSFVDSEGKENGFINGSTKEGLFVSELPDVVLISKVYMDDSKPSFGYYSNNLKDVKVITKDNVNILTGYYLKDDIKISLSLTLQDEKTIKLNSVHLDESGVAEILKFMNRKGNTNTSDSLMSFLESMNIKSIFVNFLQSNIKFILDANFIISGTTSIGQFEFICDENDNIQPYFIKFNTLETNYTLYVGNRQNMIVEPNYDLDDSGDISSTVINFSQKYLYGIDSCVNKVVISPNIYTDEINITPVYETNNTYPEVIVLDANYINEKINVNINDLSIRYVWSNDGNDFILMSTSEENKVSQVKIRFVNVFKDKTLANKLSFNFSDKQDVPVSEIILSFTPSYYEDGLIGYDLGLVSLYNEKFYINNFGMMVSGLIYINDSLYYFKPPVNNLITGFVTVGDDKYYFNPINGGAASIGETIIDDKNYYFNQSGVLQTGVFSTEDGFKYFAPANTLDENLEGEAIDFTGKLIIDENIYYFDDNYRGAVEWKELDGEMHYFSPETGKAFKGLNQIGDYKYYFNSDGVMQKGFVSINDNKHYFDDSGVMKVGYTEIDGKHFYFAENGEMQIGVFNTEDGFKYFAHHNEDLGNEEGEEISYSGILNFNNKIYYFDDSFTAVVGWKDLEDGSKYYFDEDTAEAYIGLSLINDGQYYFNDDGIMQVGFVTINDKVFYFSDSGIIESGVQNIDDNYFYIDDNGIVQIGVFDTSDGYKYFAPANTVNDNIYGQAVEYSGLVRVGEDVYYFGETYTIETGWIYDMENESDKYYFNPETKKACKGINLIDDIKYYFDEKGIMRTGLISFENNNYYFNENGEMQFGYINIEDKMFYFGEDGVMQIGVFNTPDGFKYFAHQNTLDENFEGESINYTGWLDLDEKRYYFTDEYIAATGSVIIDGEEYYFDPDTAQLVISE

SEQ ID NO: 185 - protein, 320 aa, Clostridium difficile
ASTGYTSINGKHFYFNTDGIMQIGVFKGPNGFEYFAPANTDANNIEGQAILYQNKFLTLNGKKYYFGSDSKAVTGLRTIDGKKYYFNTNTAVAVTGWQTINGKKYYFNTNTSIASTGYTIISGKHFYFNTDGIMQIGVFKGPDGFEYFAPANTDANNIEGQAIRYQNRFLYLHDNIYYFGNNSKAATGWVTIDGNRYYFEPNTAMGANGYKTIDNKNFYFRNGLPQIGVFKGSNGFEYFAPANTDANNIEGQAIRYQNRFLHLLGKIYYFGNNSKAVTGWQTINGKVYYFMPDTAMAAAGGLFEIDGVIYFFGVDGVKAP

SEQ ID NO: 186 - protein, 611 aa, Clostridium difficile
ILMSTSEENKVSQVKIRFVNVFKDKTLANKLSFNFSDKQDVPVSEIILSFTPSYYEDGLIGYDLGLVSLYNEKFYINNFGMMVSGLIYINDSLYYFKPPVNNLITGFVTVGDDKYYFNPINGGAASIGETIIDDKNYYFNQSGVLQTGVFSTEDGFKYFAPANTLDENLEGEAIDFTGKLIIDENIYYFDDNYRGAVEWKELDGEMHYFSPETGKAFKGLNQIGDYKYYFNSDGVMQKGFVSINDNKHYFDDSGVMKVGYTEIDGKHFYFAENGEMQIGVFNTEDGFKYFAHHNEDLGNEEGEEISYSGILNFNNKIYYFDDSFTAVVGWKDLEDGSKYYFDEDTAEAYIGLSLINDGQYYFNDDGIMQVGFVTINDKVFYFSDSGIIESGVQNIDDNYFYIDDNGIVQIGVFDTSDGYKYFAPANTVNDNIYGQAVEYSGLVRVGEDVYYFGETYTIETGWIYDMENESDKYYFNPETKKACKGINLIDDIKYYFDEKGIMRTGLISFENNNYYFNENGEMQFGYINIEDKMFYFGEDGVMQIGVFNTPDGFKYFAHQNTLDENFEGESINYTGWLDLDEKRYYFTDEYIAATGSVIIDGEEYYFDPDTA

SEQ ID NO: 187 - protein, 965 aa, Clostridium difficile
GWQTIDGKKYYFNTNTAIASTGYTIINGKHFYFNTDGIMQIGVFKGPNGFEYFAPANTDANNIEGQAILYQNEFLTLNGKKYYFGSDSKAVTGWRIINNKKYYFNPNNAIAAIHLCTINNDKYYFSYDGILQNGYITIERNNFYFDANNESKMVTGVFKGPNGFEYFAPANTHNNNIEGQAIVYQNKFLTLNGKKYYFDNDSKAVTGWQTIDGKKYYFNLNTAEAATGWQTIDGKKYYFNLNTAEAATGWQTIDGKKYYFNTNTFIASTGYTSINGKHFYFNTDGIMQIGVFKGPNGFEYFAPANTDANNIEGQAILYQNKFLTLNGKKYYFGSDSKAVTGLRTIDGKKYYFNTNTAVAVTGWQTINGKKYYFNTNTSIASTGYTIISGKHFYFNTDGIMQIGVFKGPDGFEYFAPANTDANNIEGQAIRYQNRFLYLHDNIYYFGNNSKAATGWVTIDGNRYYFEPNTAMGANGYKTIDNKNFYFRNGLPQIGVFKGSNGFEYFAPANTDANNIEGQAIRYQNRFLHLLGKIYYFGNNSKAVTGWQTINGKVYYFMPDTAMAAAGGLFEIDGVIYFFGVDGVKAPGFVSINDNKHYFDDSGVMKVGYTEIDGKHFYFAENGEMQIGVFNTEDGFKYFAHHNEDLGNEEGEEISYSGILNFNNKIYYFDDSFTAVVGWKDLEDGSKYYFDEDTAEAYIGLSLINDGQYYFNDDGIMQVGFVTINDKVFYFSDSGIIESGVQNIDDNYFYIDDNGIVQIGVFDTSDGYKYFAPANTVNDNIYGQAVEYSGLVRVGEDVYYFGETYTIETGWIYDMENESDKYYFNPETKKACKGINLIDDIKYYFDEKGIMRTGLISFENNNYYFNENGEMQFGYINIEDKMFYFGEDGVMQIGVFNTPDGFKYFAHQNTLDENFEGESINYTGWLDLDEKRYYFTDEYIAATGSVIIDGEEYYFDPDTAQLVISE

SEQ ID NO: 188 - protein, 965 aa, Clostridium difficile
GWQTIDGKKYYFNTNTAIASTGYTIINGKHFYFNTDGIMQIGVFKGPNGFEYFAPANTDANNIEGQAILYQNEFLTLNGKKYYFGSDSKAVTGWRIINNKKYYFNPNNAIAAIHLCTINNDKYYFSYDGILQNGYITIERNNFYFDANNESKMVTGVFKGPNGFEYFAPANTHNNNIEGQAIVYQNKFLTLNGKKYYFDNDSKAVTGWQTIDGKKYYFNLNTAEAATGWQTIDGKKYYFNLNTAEAATGWQTIDGKKYYFNTNTFIASTGYTSINGKHFYFNTDGIMQIGVFKGPNGFEYFAPANTDANNIEGQAILYQNKFLTLNGKKYYFGSDSKAVTGLRTIDGKKYYFNTNTAVAVTGWQTINGKKYYFNTNTSIASTGYTIISGKHFYFNTDGIMQIGVFKGPDGFEYFAPANTDANNIEGQAIRYQNRFLYLHDNIYYFGNNSKAATGWVTIDGNRYYFEPNTAMGANGYKTIDNKNFYFRNGLPQIGVFKGSNGFEYFAPANTDANNIEGQAIRYQNRFLHLLGKIYYFGNNSKAVTGWQTINGKVYYFMPDTAMAAAGGLNQIGDYKYYFNSDGVMQKGFVSINDNKHYFDDSGVMKVGYTEIDGKHFYFAENGEMQIGVFNTEDGFKYFAHHNEDLGNEEGEEISYSGILNFNNKIYYFDDSFTAVVGWKDLEDGSKYYFDEDTAEAYIGLSLINDGQYYFNDDGIMQVGFVTINDKVFYFSDSGIIESGVQNIDDNYFYIDDNGIVQIGVFDTSDGYKYFAPANTVNDNIYGQAVEYSGLVRVGEDVYYFGETYTIETGWIYDMENESDKYYFNPETKKACKGINLIDDIKYYFDEKGIMRTGLISFENNNYYFNENGEMQFGYINIEDKMFYFGEDGVMQIGVFNTPDGFKYFAHQNTLDENFEGESINYTGWLDLDEKRYYFTDEYIAATGSVIIDGEEYYFDPDTAQLVISE

SEQ ID NO: 189 - protein, 832 aa, Clostridium difficile
GWQTIDGKKYYFNTNTAIASTGYTIINGKHFYFNTDGIMQIGVFKGPNGFEYFAPANTDANNIEGQAILYQNEFLTLNGKKYYFGSDSKAVTGWRIINNKKYYFNPNNAIAAIHLCTINNDKYYFSYDGILQNGYITIERNNFYFDANNESKMVTGVFKGPNGFEYFAPANTHNNNIEGQAIVYQNKFLTLNGKKYYFDNDSKAVTGWQTIDGKKYYFNLNTAEAATGWQTIDGKKYYFNLNTAEAATGWQTIDGKKYYFNTNTFIASTGYTSINGKHFYFNTDGIMQIGVFKGPNGFEYFAPANTDANNIEGQAILYQNKFLTLNGKKYYFGSDSKAVTGLRTIDGKKYYFNTNTAVAVTGWQTINGKKYYFNTNTSIASTGYTIISGKHFYFNTDGIMQIGVFKGPDGFEYFAPANTDANNIEGQAIRYQNRFLYLHDNIYYFGNNSKAATGWVTIDGNRYYFEPNTAMGANGYKTIDNKNFYFRNGLPQIGVFKGSNGFEYFAHHNEDLGNEEGEEISYSGILNFNNKIYYFDDSFTAVVGWKDLEDGSKYYFDEDTAEAYIGLSLINDGQYYFNDDGIMQVGFVTINDKVFYFSDSGIIESGVQNIDDNYFYIDDNGIVQIGVFDTSDGYKYFAPANTVNDNIYGQAVEYSGLVRVGEDVYYFGETYTIETGWIYDMENESDKYYFNPETKKACKGINLIDDIKYYFDEKGIMRTGLISFENNNYYFNENGEMQFGYINIEDKMFYFGEDGVMQIGVFNTPDGFKYFAHQNTLDENFEGESINYTGWLDLDEKRYYFTDEYIAATGSVIIDGEEYYFDPDTAQLVISE

SEQ ID NO: 190 - protein, 1056 aa, Clostridium difficile
GWQTIDGKKYYFNTNTAIASTGYTIINGKHFYFNTDGIMQIGVFKGPNGFEYFAPANTDANNIEGQAILYQNEFLTLNGKKYYFGSDSKAVTGWRIINNKKYYFNPNNAIAAIHLCTINNDKYYFSYDGILQNGYITIERNNFYFDANNESKMVTGVFKGPNGFEYFAPANTHNNNIEGQAIVYQNKFLTLNGKKYYFDNDSKAVTGWQTIDGKKYYFNLNTAEAATGWQTIDGKKYYFNLNTAEAATGWQTIDGKKYYFNTNTFIASTGYTSINGKHFYFNTDGIMQIGVFKGPNGFEYFAPANTDANNIEGQAILYQNKFLTLNGKKYYFGSDSKAVTGLRTIDGKKYYFNTNTAVAVTGWQTINGKKYYFNTNTSIASTGYTIISGKHFYFNTDGIMQIGVFKGPDGFEYFAPANTDANNIEGQAIRYQNRFLYLHDNIYYFGNNSKAATGWVTIDGNRYYFEPNTAMGANGYKTIDNKNFYFRNGLPQIGVFKGSNGFEYFAPANTDANNIEGQAIRYQNRFLHLLGKIYYFGNNSKAVTGWQTINGKVYYFMPDTAMAAAGGETIIDDKNYYFNQSGVLQTGVFSTEDGFKYFAPANTLDENLEGEAIDFTGKLIIDENIYYFDDNYRGAVEWKELDGEMHYFSPETGKAFKGLNQIGDYKYYFNSDGVMQKGFVSINDNKHYFDDSGVMKVGYTEIDGKHFYFAENGEMQIGVFNTEDGFKYFAHHNEDLGNEEGEEISYSGILNFNNKIYYFDDSFTAVVGWKDLEDGSKYYFDEDTAEAYIGLSLINDGQYYFNDDGIMQVGFVTINDKVFYFSDSGIIESGVQNIDDNYFYIDDNGIVQIGVFDTSDGYKYFAPANTVNDNIYGQAVEYSGLVRVGEDVYYFGETYTIETGWIYDMENESDKYYFNPETKKACKGINLIDDIKYYFDEKGIMRTGLISFENNNYYFNENGEMQFGYINIEDKMFYFGEDGVMQIGVFNTPDGFKYFAHQNTLDENFEGESINYTGWLDLDEKRYYFTDEYIAATGSVIIDGEEYYFDPDTAQLVISE

SEQ ID NO: 191 - protein, 970 aa, Clostridium difficile
GWQTIDGKKYYFNTNTAIASTGYTIINGKHFYFNTDGIMQIGVFKGPNGFEYFAPANTDANNIEGQAILYQNEFLTLNGKKYYFGSDSKAVTGWRIINNKKYYFNPNNAIAAIHLCTINNDKYYFSYDGILQNGYITIERNNFYFDANNESKMVTGVFKGPNGFEYFAPANTHNNNIEGQAIVYQNKFLTLNGKKYYFDNDSKAVTGWQTIDGKKYYFNLNTAEAATGWQTIDGKKYYFNLNTAEAATGWQTIDGKKYYFNTNTFIASTGYTSINGKHFYFNTDGIMQIGVFKGPNGFEYFAPANTDANNIEGQAILYQNKFLTLNGKKYYFGSDSKAVTGLRTIDGKKYYFNTNTAVAVTGWQTINGKKYYFNTNTSIASTGYTIISGKHFYFNTDGIMQIGVFKGPDGFEYFAPANTDANNIEGQAIRYQNRFLYLHDNIYYFGNNSKAATGWVTIDGNRYYFEPNTAMGANGYKTIDNKNFYFRNGLPQIGVFKGSNGFEYFAPANTDANNIEGQAIRYQNRFLHLLGKIYYFGNNSKAVTGWQTINGKVYYFMPDTAMAAAGGLFEIDGVIYFFGVDGVKAPGIYGGGFVSINDNKHYFDDSGVMKVGYTEIDGKHFYFAENGEMQIGVFNTEDGFKYFAHHNEDLGNEEGEEISYSGILNFNNKIYYFDDSFTAVVGWKDLEDGSKYYFDEDTAEAYIGLSLINDGQYYFNDDGIMQVGFVTINDKVFYFSDSGIIESGVQNIDDNYFYIDDNGIVQIGVFDTSDGYKYFAPANTVNDNIYGQAVEYSGLVRVGEDVYYFGETYTIETGWIYDMENESDKYYFNPETKKACKGINLIDDIKYYFDEKGIMRTGLISFENNNYYFNENGEMQFGYINIEDKMFYFGEDGVMQIGVFNTPDGFKYFAHQNTLDENFEGESINYTGWLDLDEKRYYFTDEYIAATGSVIIDGEEYYFDPDTAQLVISE

SEQ ID NO: 192 - protein, 1112 aa, Clostridium difficile
ATGWQTIDGKKYYFNTNTAIASTGYTIINGKHFYFNTDGIMQIGVFKGPNGFEYFAPANTDANNIEGQAILYQNEFLTLNGKKYYFGSDSKAVTGWRIINNKKYYFNPNNAIAAIHLCTINNDKYYFSYDGILQNGYITIERNNFYFDANNESKMVTGVFKGPNGFEYFAPANTHNNNIEGQAIVYQNKFLTLNGKKYYFDNDSKAVTGWQTIDGKKYYFNLNTAEAATGWQTIDGKKYYFNLNTAEAATGWQTIDGKKYYFNTNTFIASTGYTSINGKHFYFNTDGIMQIGVFKGPNGFEYFAPANTDANNIEGQAILYQNKFLTLNGKKYYFGSDSKAVTGLRTIDGKKYYFNTNTAVAVTGWQTINGKKYYFNTNTSIASTGYTIISGKHFYFNTDGIMQIGVFKGPDGFEYFAPANTDANNIEGQAIRYQNRFLYLHDNIYYFGNNSKAATGWVTIDGNRYYFEPNTAMGANGYKTIDNKNFYFRNGLPQIGVFKGSNGFEYFAPANTDANNIEGQAIRYQNRFLHLLGKIYYFGNNSKAVTGWQTINGKVYYFMPDTAMAAAGGLFEIDGVIYFFGVDGVKAPGIYGGTGFVTVGDDKYYFNPINGGAASIGETIIDDKNYYFNQSGVLQTGVFSTEDGFKYFAPANTLDENLEGEAIDFTGKLIIDENIYYFDDNYRGAVEWKELDGEMHYFSPETGKAFKGLNQIGDYKYYFNSDGVMQKGFVSINDNKHYFDDSGVMKVGYTEIDGKHFYFAENGEMQIGVFNTEDGFKYFAHHNEDLGNEEGEEISYSGILNFNNKIYYFDDSFTAVVGWKDLEDGSKYYFDEDTAEAYIGLSLINDGQYYFNDDGIMQVGFVTINDKVFYFSDSGIIESGVQNIDDNYFYIDDNGIVQIGVFDTSDGYKYFAPANTVNDNIYGQAVEYSGLVRVGEDVYYFGETYTIETGWIYDMENESDKYYFNPETKKACKGINLIDDIKYYFDEKGIMRTGLISFENNNYYFNENGEMQFGYINIEDKMFYFGEDGVMQIGVFNTPDGFKYFAHQNTLDENFEGESINYTGWLDLDEKRYYFTDEYIAATGSVIIDGEEYYFDPDTAQLVISEHHHHHH

SEQ ID NO: 193 - protein, 1107 aa, Clostridium difficile
ATGWQTIDGKKYYFNTNTAIASTGYTIINGKHFYFNTDGIMQIGVFKGPNGFEYFAPANTDANNIEGQAILYQNEFLTLNGKKYYFGSDSKAVTGWRIINNKKYYFNPNNAIAAIHLCTINNDKYYFSYDGILQNGYITIERNNFYFDANNESKMVTGVFKGPNGFEYFAPANTHNNNIEGQAIVYQNKFLTLNGKKYYFDNDSKAVTGWQTIDGKKYYFNLNTAEAATGWQTIDGKKYYFNLNTAEAATGWQTIDGKKYYFNTNTFIASTGYTSINGKHFYFNTDGIMQIGVFKGPNGFEYFAPANTDANNIEGQAILYQNKFLTLNGKKYYFGSDSKAVTGLRTIDGKKYYFNTNTAVAVTGWQTINGKKYYFNTNTSIASTGYTIISGKHFYFNTDGIMQIGVFKGPDGFEYFAPANTDANNIEGQAIRYQNRFLYLHDNIYYFGNNSKAATGWVTIDGNRYYFEPNTAMGANGYKTIDNKNFYFRNGLPQIGVFKGSNGFEYFAPANTDANNIEGQAIRYQNRFLHLLGKIYYFGNNSKAVTGWQTINGKVYYFMPDTAMAAAGGLFEIDGVIYFFGVDGVKAVTGFVTVGDDKYYFNPINGGAASIGETIIDDKNYYFNQSGVLQTGVFSTEDGFKYFAPANTLDENLEGEAIDFTGKLIIDENIYYFDDNYRGAVEWKELDGEMHYFSPETGKAFKGLNQIGDYKYYFNSDGVMQKGFVSINDNKHYFDDSGVMKVGYTEIDGKHFYFAENGEMQIGVFNTEDGFKYFAHHNEDLGNEEGEEISYSGILNFNNKIYYFDDSFTAVVGWKDLEDGSKYYFDEDTAEAYIGLSLINDGQYYFNDDGIMQVGFVTINDKVFYFSDSGIIESGVQNIDDNYFYIDDNGIVQIGVFDTSDGYKYFAPANTVNDNIYGQAVEYSGLVRVGEDVYYFGETYTIETGWIYDMENESDKYYFNPETKKACKGINLIDDIKYYFDEKGIMRTGLISFENNNYYFNENGEMQFGYINIEDKMFYFGEDGVMQIGVFNTPDGFKYFAHQNTLDENFEGESINYTGWLDLDEKRYYFTDEYIAATGSVIIDGEEYYFDPDTAQLVISEHHHHHH

SEQ ID NO: 194 - protein, 1128 aa, Clostridium difficile
ATGWQTIDGKKYYFNTNTAIASTGYTIINGKHFYFNTDGIMQIGVFKGPNGFEYFAPANTDANNIEGQAILYQNEFLTLNGKKYYFGSDSKAVTGWRIINNKKYYFNPNNAIAAIHLCTINNDKYYFSYDGILQNGYITIERNNFYFDANNESKMVTGVFKGPNGFEYFAPANTHNNNIEGQAIVYQNKFLTLNGKKYYFDNDSKAVTGWQTIDGKKYYFNLNTAEAATGWQTIDGKKYYFNLNTAEAATGWQTIDGKKYYFNTNTFIASTGYTSINGKHFYFNTDGIMQIGVFKGPNGFEYFAPANTDANNIEGQAILYQNKFLTLNGKKYYFGSDSKAVTGLRTIDGKKYYFNTNTAVAVTGWQTINGKKYYFNTNTSIASTGYTIISGKHFYFNTDGIMQIGVFKGPDGFEYFAPANTDANNIEGQAIRYQNRFLYLHDNIYYFGNNSKAATGWVTIDGNRYYFEPNTAMGANGYKTIDNKNFYFRNGLPQIGVFKGSNGFEYFAPANTDANNIEGQAIRYQNRFLHLLGKIYYFGNNSKAVTGWQTINGKVYYFMPDTAMAAAGGLFEIDGVIYFFGVDGVKAVSGLIYINDSLYYFKPPVNNLITGFVTVGDDKYYFNPINGGAASIGETIIDDKNYYFNQSGVLQTGVFSTEDGFKYFAPANTLDENLEGEAIDFTGKLIIDENIYYFDDNYRGAVEWKELDGEMHYFSPETGKAFKGLNQIGDYKYYFNSDGVMQKGFVSINDNKHYFDDSGVMKVGYTEIDGKHFYFAENGEMQIGVFNTEDGFKYFAHHNEDLGNEEGEEISYSGILNFNNKIYYFDDSFTAVVGWKDLEDGSKYYFDEDTAEAYIGLSLINDGQYYFNDDGIMQVGFVTINDKVFYFSDSGIIESGVQNIDDNYFYIDDNGIVQIGVFDTSDGYKYFAPANTVNDNIYGQAVEYSGLVRVGEDVYYFGETYTIETGWIYDMENESDKYYFNPETKKACKGINLIDDIKYYFDEKGIMRTGLISFENNNYYFNENGEMQFGYINIEDKMFYFGEDGVMQIGVFNTPDGFKYFAHQNTLDENFEGESINYTGWLDLDEKRYYFTDEYIAATGSVIIDGEEYYFDPDTAQLVISEHHHHHH

SEQ ID NO: 195 - protein, 994 aa, Clostridium difficile
ATGWQTIDGKKYYFNTNTAIASTGYTIINGKHFYFNTDGIMQIGVFKGPNGFEYFAPANTDANNIEGQAILYQNEFLTLNGKKYYFGSDSKAVTGWRIINNKKYYFNPNNAIAAIHLCTINNDKYYFSYDGILQNGYITIERNNFYFDANNESKMVTGVFKGPNGFEYFAPANTHNNNIEGQAIVYQNKFLTLNGKKYYFDNDSKAVTGWQTIDGKKYYFNLNTAEAATGWQTIDGKKYYFNLNTAEAATGWQTIDGKKYYFNTNTFIASTGYTSINGKHFYFNTDGIMQIGVFKGPNGFEYFAPANTDANNIEGQAILYQNKFLTLNGKKYYFGSDSKAVTGLRTIDGKKYYFNTNTAVAVTGWQTINGKKYYFNTNTSIASTGYTIISGKHFYFNTDGIMQIGVFKGPDGFEYFAPANTDANNIEGQAIRYQNRFLYLHDNIYYFGNNSKAATGWVTIDGNRYYFEPNTAMGANGYKTIDNKNFYFRNGLPQIGVFKGSNGFEYFAPANTDANNIEGQAIRYQNRFLHLLGKIYYFGNNSKAVTGWQTINGKVYYFMPDTAMAAAGGLFEIDGVIYFFGVDGVKAVKGLNQIGDYKYYFNSDGVMQKGFVSINDNKHYFDDSGVMKVGYTEIDGKHFYFAENGEMQIGVFNTEDGFKYFAHHNEDLGNEEGEEISYSGILNFNNKIYYFDDSFTAVVGWKDLEDGSKYYFDEDTAEAYIGLSLINDGQYYFNDDGIMQVGFVTINDKVFYFSDSGIIESGVQNIDDNYFYIDDNGIVQIGVFDTSDGYKYFAPANTVNDNIYGQAVEYSGLVRVGEDVYYFGETYTIETGWIYDMENESDKYYFNPETKKACKGINLIDDIKYYFDEKGIMRTGLISFENNNYYFNENGEMQFGYINIEDKMFYFGEDGVMQIGVFNTPDGFKYFAHQNTLDENFEGESINYTGWLDLDEKRYYFTDEYIAATGSVIIDGEEYYFDPDTAQLVISEHHHHHH

SEQ ID NO: 196 - protein, 2710 aa, Clostridium difficile
MSLISKEELIKLAYSIRPRENEYKTILTNLDEYNKLTTNNNENKYLQLKKLNESIDVFMNKYKNSSRNRALSNLKKDILKEVILIKNSNTSPVEKNLHFVWIGGEVSDIALEYIKQWADINAEYNVKLWYDSEAFLVNTLKKAIVESSTTEALQLLEEEIQNPQFDNMKFYKKRMEFIYDRQKRFINYYKSQINKPTVPTIDDIIKSHLVSEYNRDETLLESYRTNSLRKINSNHGIDIRANSLFTEQELLNIYSQELLNRGNLAAASDIVRLLALKNFGGVYLDVDMLPGIHSDLFKTISRPSSIGLDRWEMIKLEAIMKYKKYINNYTSENFDKLDQQLKDNFKLIIESKSEKSEIFSKLENLNVSDLEIKIAFALGSVINQALISKQGSYLTNLVIEQVKNRYQFLNQHLNPAIESDNNFTDTTKIFHDSLFNSATAENSMFLTKIAPYLQVGFMPEARSTISLSGPGAYASAYYDFINLQENTIEKTLKASDLIEFKFPENNLSQLTEQEINSLWSFDQASAKYQFEKYVRDYTGGSLSEDNGVDFNKNTALDKNYLLNNKIPSNNVEEAGSKNYVHYIIQLQGDDISYEATCNLFSKNPKNSIIIQRNMNESAKSYFLSDDGESILELNKYRIPERLKNKEKVKVTFIGHGKDEFNTSEFARLSVDSLSNEISSFLDTIKLDISPKNVEVNLLGCNMFSYDFNVEETYPGKLLLSIMDKITSTLPDVNKDSITIGANQYEVRINSEGRKELLAHSGKWINKEEAIMSDLSSKEYIFFDSIDNKLKAKSKNIPGLASISEDIKTLLLDASVSPDTKFILNNLKLNIESSIGDYIYYEKLEPVKNIIHNSIDDLIDEFNLLENVSDELYELKKLNNLDEKYLISFEDISKNNSTYSVRFINKSNGESVYVETEKEIFSKYSEHITKEISTIKNSIITDVNGNLLDNIQLDHTSQVNTLNAAFFIQSLIDYSSNKDVLNDLSTSVKVQLYAQLFSTGLNTIYDSIQLVNLISNAVNDTINVLPTITEGIPIVSTILDGINLGAAIKELLDEHDPLLKKELEAKVGVLAINMSLSIAATVASIVGIGAEVTIFLLPIAGISAGIPSLVNNELILHDKATSVVNYFNHLSESKKYGPLKTEDDKILVPIDDLVISEIDFNNNSIKLGTCNILAMEGGSGHTVTGNIDHFFSSPYISSHIPSLSVYSAIGIKTENLDFSKKIMMLPNAPSRVFWWETGAVPGLRSLENDGTKLLDSIRDLYPGKFYWRFYAFFDYAITTLKPVYEDTNTKIKLDKDTRNFIMPTITTDEIRNKLSYSFDGAGGTYSLLLSSYPISMNINLSKDDLWIFNIDNEVREISIENGTIKKGNLIEDVLSKIDINKNKLIIGNQTIDFSGDIDNKDRYIFLTCELDDKISLIIEINLVAKSYSLLLSGDKNYLISNLSNTIEKINTLGLDSKNIAYNYTDESNNKYFGAISKTSQKSIIHYKKDSKNILEFYNGSTLEFNSKDFIAEDINVFMKDDINTITGKYYVDNNTDKSIDFSISLVSKNQVKVNGLYLNESVYSSYLDFVKNSDGHHNTSNFMNLFLNNISFWKLFGFENINFVIDKYFTLVGKTNLGYVEFICDNNKNIDIYFGEWKTSSSKSTIFSGNGRNVVVEPIYNPDTGEDISTSLDFSYEPLYGIDRYINKVLIAPDLYTSLININTNYYSNEYYPEIIVLNPNTFHKKVNINLDSSSFEYKWSTEGSDFILVRYLEESNKKILQKIRIKGILSNTQSFNKMSIDFKDIKKLSLGYIMSNFKSFNSENELDRDHLGFKIIDNKTYYYDEDSKLVKGLININNSLFYFDPIESNLVTGWQTINGKKYYFDINTGAASTSYKIINGKHFYFNNNGVMQLGVFKGPDGFEYFAPANTQNNNIEGQAIVYQSKFLTLNGKKYYFDNDSKAVTGWRIINNEKYYFNPNNAIAAVGLQVIDNNKYYFNPDTAIISKGWQTVNGSRYYFDTDTAIAFNGYKTIDGKHFYFDSDCVVKIGVFSGSNGFEYFAPANTYNNNIEGQAIVYQSKFLTLNGKKYYFDNNSKAVTGWQTIDSKKYYFNTNTAEAATGWQTIDGKKYYFNTNTAEAATGWQTIDGKKYYFNTNTSIASTGYTIINGKHFYFNTDGIMQIGVFKGPNGFEYFAPANTHNNNIEGQAILYQNKFLTLNGKKYYFGSDSKAITGWQTIDGKKYYFNPNNAIAATHLCTINNDKYYFSYDGILQNGYITIERNNFYFDANNESKMVTGVFKGPNGFEYFAPANTHNNNIEGQAIVYQNKFLTLNGKKYYFDNDSKAVTGWQTIDSKKYYFNLNTAVAVTGWQTIDGEKYYFNLNTAEAATGWQTIDGKRYYFNTNTYIASTGYTIINGKHFYFNTDGIMQIGVFKGPDGFEYFAPANTHNNNIEGQAILYQNKFLTLNGKKYYFGSDSKAVTGLRTIDGKKYYFNTNTAVAVTGWQTINGKKYYFNTNTYIASTGYTIISGKHFYFNTDGIMQIGVFKGPDGFEYFAPANTDANNIEGQAIRYQNRFLYLHDNIYYFGNDSKAATGWATIDGNRYYFEPNTAMGANGYKTIDNKNFYFRNGLPQIGVFKGPNGFEYFAPANTDANNIDGQAIRYQNRFLHLLGKIYYFGNNSKAVTGWQTINSKVYYFMPDTAMAAAGGLFEIDGVIYFFGVDGVKAPGIYG

SEQ ID NO: 197 - protein, 2710 aa, Clostridium difficile; identical to SEQ ID NO: 15

SEQ ID NO: 198 - protein, 2710 aa, Clostridium difficile; identical to SEQ ID NO: 92

SEQ ID NO: 199 - protein, 2710 aa, Clostridium difficile; identical to SEQ ID NO: 15

SEQ ID NO: 200 - protein, 2710 aa, Clostridium difficile; identical to SEQ ID NO: 15

SEQ ID NO: 201 - protein, 2710 aa, Clostridium difficile
MSLISKEELIKLAYSIRPRENEYKTILTNLDEYNKLTTNNNENKYLQLKKLNESIDVFMNKYKNSSRNRALSNLKKDILKEVILIKNSNTSPVEKNLHFVWIGGEVSDIALEYIKQWADINAEYNIKLWYDSEAFLVNTLKKAIVESSTTEALQLLEEEIQNPQFDNMKFYKKRMEFIYDRQKRFINYYKSQINKPTVPTIDDIIKSHLVSEYNRDETLLESYRTNSLRKINSNHGIDIRANSLFTEQELLNIYSQELLNRGNLAAASDIVRLLALKNFGGVYLDVDMLPGIHSDLFKTISRPSSIGLDRWEMIKLEAIMKYKKYINNYTSENFDKLDQQLKDNFKLIIESKSEKSEIFSKLENLNVSDLEIKIAFALGSVINQALISKQGSYLTNLVIEQVKNRYQFLNQHLNPAIESDNNFTDTTKIFHDSLFNSATAENSMFLTKIAPYLQVGFMPEARSTISLSGPGAYASAYYDFINLQENTIEKTLKASDLIEFKFPENNLSQLTEQEINSLWSFDQASAKYQFEKYVRDYTGGSLSEDNGVDFNKNTALDKNYLLNNKIPSNNVEEAGSKNYVHYIIQLQGDDISYEATCNLFSKNPKNSIIIQRNMNESAKSYFLSDDGESILELNKYRIPERLKNKEKVKVTFIGHGKDEFNTSEFARLSVDSLSNEISSFLDTIKLDISPKNVEVNLLGCNMFSYDFNVEETYPGKLLLSIMDKITSTLPDVNKDSITIGANQYEVRINSEGRKELLAHSGKWINKEEAIMSDLSSKEYIFFDSIDNKLKAKSKNIPGLASISEDIKTLLLDASVSPDTKFILNNLKLNIESSIGDYIYYEKLEPVKNIIHNSIDDLIDEFNLLENVSDELYELKKLNNLDEKYLISFEDISKNNSTYSVRFINKSNGESVYVETEKEIFSKYSEHITKEISTIKDSIITDVNGNLLDNIQLDHTSQVNTLNAAFFIQSLIDYSSNKDVLNDLSTSVKVQLYAQLFSTGLNTIYDSIQLVNLISNAVNDTINVLPTITEGIPIVSTILDGINLGAAIKELLDEHDPLLKKELEAKVGVLAINMSLSIAATVASIVGIGAEVTIFLLPIAGISAGIPSLVNNELILHDKATSVVNYFNHLSESKKYGPLKTEDDKILVPIDDLVISEIDFNNNSIKLGTCNILAMEGGSGHTVTGNIDHFFSSPYISSHIPSLSVYSAIGIKTENLDFSKKIMMLPNAPSRVFWWETGAVPGLRSLENDGTKLLDSIRDLYPGKFYWRFYAFFDYAITTLKPVYEDTNIKIKLDKDTRNFIMPTITTDEIRNKLSYSFDGAGGTYSLLLSSYPISMNINLSKDDLWIFNIDNEVREISIENGTIKKGNLIEDVLSKIDINKNKLIIGNQTIDFSGDIDNKDRYIFLTCELDDKISLIIEINLVAKSYSLLLSGDKNYLISNLSNTIEKINTLGLDSKNIAYNYTDESNNKYFGVISKTSQKSIIHYKKDSKNILEFYNGSTLEFNSKDFIAEDINVFMKDDINTITGKYYVDNNTDKSIDFSISLVSKNQVKVNGLYLNESVYSSYLDFVKNSDGHHNTSNFMNLFLNNISFWKLFGFENINFVIDKYFTLVGKTNLGYVEFICDNNKNIDIYFGEWKTSSSKSTIFSGNGRNVVVEPIYNPDTGEDISTSLDFSYEPLYGIDRYINKVLIAPDLYTSLININTNYYSNEYYPEIIVLNPNTFHKKVNINLDSSSFEYKWSTEGSDFILVRYLEESNKKILQKIRIKGILSNTQSFNKMSIDFKDIKKLSLGYIMSNFKSFNSENELDRDHLGFKIIDNKTYYYDEDSKLVKGLININNSLFYFDPIESNLVTGWQTINGKKYYFDINTGAASTSYKIINGKHFYFNNNGVMQLGVFKGPDGFEYFAPANTQNNNIEGQAIVYQSKFLTLNGKKYYFDNDSKAVSGWRIINNEKYYFNPNNAIAAVGLQVIDNNKYYFNPDTAIISKGWQTVNGSRYYFDTDTAIAFNGYKTIDGKHFYFDSDCVVKIGVFSGSNGFEYFAPANTYNNNIEGQAIVYQSKFLTLNGKKYYFDNNSKAVTGWQTIDSKKYYFNTNTAEAATGWQTIDGKKYYFNTNTAEAATGWQTIDGKKYYFNTNTSIASTGYTIINGKHFYFNTDGIMQIGVFKGPNGFEYFAPANTHNNNIEGQAILYQNKFLTLNGKKYYFGSDSKAITGWQTIDGKKYYFNPNNAIAATHLCTINNDKYYFSYDGILQNGYITIERNNFYFDANNESKMVTGVFKGPNGFEYFAPANTHNNNIEGQAIVYQNKFLTLNGKKYYFDNDSKAVTGWQTIDSKKYYFNLNTAVAVTGWQTIDGEKYYFNLNTAEAATGWQTIDGKRYYFNTNTYIASTGYTIINGKHFYFNTDGIMQIGVFKGPDGFEYFAPANTHNNNIEGQAILYQNKFLTLNGKKYYFGSDSKAVTGLRTIDGKKYYFNTNTAVAVTGWQTINGKKYYFNTNTSIASTGYTIISGKHFYFNTDGIMQIGVFKGPDGFEYFAPANTDANNIEGQAIRYQNRFLYLHDNIYYFGNDSKAATGWATIDGNRYYFEPNTAMGANGYKTIDNKNFYFRNGLPQIGVFKGPNGFEYFAPANTDANNIDGQAIRYQNRFLHLLGKIYYFGNNSKAVTGWQTINSKVYYFMPDTAMAAAGGLFEIDGVIYFFGVDGVKAPGIYG

SEQ ID NO: 202 - protein, 2710 aa, Clostridium difficile
MSLISKEELIKLAYSIRPRENEYKTILTNLDEYNKLTTNNNENKYLQLKKLNESIDVFMNKYKNSSRNRALSNLKKDILKEVILIKNSNTSPVEKNLHFVWIGGEVSDIALEYIKQWADINAEYNIKLWYDSEAFLVNTLKKAIVESSTTEALQLLEEEIQNPQFDNMKFYKKRMEFIYDRQKRFVNYYKSQINKPTVPTIDDIIKSHLVSEYNRDETLLESYRTNSLRKINSNHGIDIRANSLFTEQELLNIYSQELLNRGNLAAASDIVRLLALKNFGGVYLDVDMLPGIHSDLFKTISRPSSIGLDRWEMIKLEAIMKYKKYINNYTSENFDKLDQQLKDNFKLIIESKSEKSEIFSKLENLNVSDLEIKIAFALGSVINQALISKQGSYLTNLVIEQVKNRYQFLNQHLNPAIESDNNFTDTTKIFHDSLFNSATAENSMFLTKIAPYLQVGFMPEARSTISLSGPGAYASAYYDFINLQENTIEKTLKASDLIEFKFPENNLSQLTEQEINSLWSFDQASAKYQFEKYVRDYTGGSLSEDNEVDFNKNTALDKNYLLNNKIPSNNVEEAGSKNYVHYIIQLQGDDISYEATCNLFSKNPKNSIIIQRNMNESAKSYFLSDDGESILELNKYRIPERLKNKEKVKVTFIGHGKDEFNTSEFARLSVDSLSNEISSFLDTIKLDISPKNVEVNLLGCNMFSYDFNVEETYPGKLLLSIMDKITSTLPDVNKDSITIGANQYEVRINSEGRKELLAHSGKWINKEEAIMSDLSSKEYIFFDSIDNKLKAKSKNIPGLASISEDIKTLLLDTSVSPDTKFILNNLKLNIESSVGDYIYYEKLEPVKNIIHNSIDDLIDEFNLLENVSDELYELKKLNNLDEKYLISFEDISKNNSTYSVRFINKSNGESVYVETEKEIFSKYSEHITKEISTIKNSIITDVNGNLLDNIQLDHTSQVNTLNAAFFIQSLIDYSSNKDVLNDLSTSVKVQLYAQLFSTGLNTIYDSIQLVNLISNAVNDTINVLPTITEGIPIVSTILDGINLGAAIKELLDEHDPLLKKELEAKVGVLAINMSLSIAATVASIVGIGAEVTIFLLPIAGISAGIPSLVNNELILHDKATSVVNYFNHLSESKEYGPLKTEDDKILVPIDDLVISEIDFNNNAIKLGTCNILAMEGGSGHTVTGNIDHFFSSPSISSHIPSLSIYSAIGIKTENLDFSKKIMMLPNAPSRVFWWETGAVPGLRSLENNGTKLLDSIRDLYPGKFYWRFYAFFDYAITTLKPVYEDTNIKIKLDKDTRNFIMPTITTNEIRNKLSYSFDGAGGTYSLLLSSYPISTNINLSKDDLWIFNIDNEVREISIENGTIKKGKLIKDVLSKIDINKNKLIIGNQTIDFSGDIDNKDRYIFLTCELDDKISLIIEINLVAKSYSLLLSGDKNYLISNLSNTIEKINTLGLDSKNIAYNYTDESNNKYFGAISKTSQKSIIHYKKDSKNILEFYNGSTLEFNSKDFIAEDINVFMKDDINTITGKYYVDNNTDKSIDFSISLVSKNQAKVNGLYLNESVYSSYLDFVKNADGHHNTSNFMNLFLDNISFWKLFGFENINFVVDKYFTLVGKTNLGYVEFICDNNKNIDIYFGEWKTSSSKSTIFSGNGRNVVVEPIYNPDTGEDISTSLDFSYEPLYGIDRYINKVLIAPDLYTSLININTNYYSNEYYPEIIVLNPNTFHKKVNINLDSSSFEYKWSTEGSDFILVRYLEESNKKILQKIRIKGILSNTQSFNKKSIDFKDIKKLSLVYIMSNFKSFNSENELDRDHLGFKIIDNKTYYYDEASKLVKGLININNSLFYFDPIESNLVTGWQTINGKKYYFDINTGAALTSYKIINGKHFYFNNNGVMQLGVFKGPDGFEYFAPANTQNNNIEGQAIVYQSKFLTLNGKKYYFDNDSKAVTGWRIINNEKYYFNPNNAIAAVGLQVIDNNKYYFNPDTAIISKGWQTVNGSRYYFDTDTAIAFNGYKTIDGKHFYFDSDCVVKIGVFSGSNGFEYFAPANTYNNNIEGQAIVYQSKFLTLNGEKYYFDNNSKAVTGWQTIDSKKYYFNTNTAEAATGWQTIDGKKYYFNTNTAEVATGWQTIDGKKYYFNTNTSIASTGYTIINGKHFYFNTDGIMQIGVFKGPDGFEYFAPANTDANNIEGQAILYQNKFLTLNDKKYYFASDSKAVTGWRIINNKKYYFNPNNAIAATHLYTINNDKYYFSYDGILQNGYITIERNNFYFDANNESKMVTGVFKGPNGFEYFAPANTHNNNIEGQAIVYQNKFLTLNGKKYYFDNDSKAVTGWQTIDGKKYYFNLNTAVAVTGWQTIDGKKYYFNTNTAEAATGWQTIDGKKYYFNTNTSIASTGYTIINGKHFYFNTDGIMQIGVFKGPDGFEYFAPANTDANNIEGQAILYQNKFLTLNGKKYYFASDSKAVTGLRTIDGKKYYFNTNTAEAATGWQTIDGKKYYFNTNTSIASTGYTIINDKHFYFNTDGIMQIGVFKGPDGFEYFAPANTDANNIEGQAIRYQNRFLYLHDNIYYFGNNSKAATGWVTIDGRRYYFEPNTAIGANGYKIIDNKNFYFRNGLPQIGVFKGPNGFEYFAPANTDANNIDGQAIRYQNRFLHLLGNIYYFGNNSKAVTGWQTINGNMYYFMPDTAMAAAGGLFEIDGVIYFFGVDGVKAPGIYG

SEQ ID NO: 203 - protein, 2710 aa, Artificial Sequence
  Synthetic amino acid sequence
GSLISKEELIKLAYSIRPRENEYKTILTNLDEYNKLTTNNNENKYLQLKKLNESIDVFMNKYKTSSRNRALSNLKKDILKEVILIKNSNTSPVEKNLHFVAIGGEVSDIALEYIKQWADINAEYNIKLWYDSEAFLVNTLKKAIVESSTTEALQLLEEEIQNPQFDNMKFYKKRMEFIYDRQKRFINYYKSQINKPTVPTIDDIIKSHLVSEYNRDETVLESYRTNSLRKINSNHGIDIRANSLFTEQELLNIYSQELLNRGNLAAASDIVRLLALKNFGGVYLDVAMLPGIHSDLFKTISRPSSIGLDRWEMIKLEAIMKYKKYINNYTSENFDKLDQQLKDNFKLIIESKSEKSEIFSKLENLNVSDLEIKIAFALGSVINQALISKQGSYLTNLVIEQVKNRYQFLNQHLNPAIESDNNFTDTTKIFHDSLFNSATAENSMFLTKIAPYLQVGFMPEARSTISLSGPGAYASAYYDFINLQENTIEKTLKASDLIEFKFPENNLSQLTEQQINSLWSFDQASAKYQFEKYVRDYTGGSLSEDNGVDFNKNTALDKNYLLNNKIPSNNVEEAGSKNYVHYIIQLQGDDISYEATCNLFSKNPKNSIIIQRNMNESAKSYFLSDDGESILELNKYRIPERLKNKEKVKVTFIGHGKDEFNTSEFARLSVDSLSNEISSFLDTIKLDISPKNVEVNLLGCNMFSYDFNVEETYPGKLLLSIMDKITSTLPDVNKNSITIGANQYEVRINSEGRKELLAHSGKWINKEEAIMSDLSSKEYIFFDSIDNKLKAKSKNIPGLASISEDIKTLLLDASVSPDTKFILNNLKLNIESSIGDYIYYEKLEPVKNIIHNSIDDLIDEFNLLENVSDELYELKKLNNLDEKYLISFEDISKNNSTYSVRFINKSNGESVYVETEKEIFSKYSEHITKEISTIKNSIITDVNGNLLDNIQLDHTSQVNTLNAAFFIQSLIDYSSNKDVLNDLSTSVKVQLYAQLFSTGLNTIYDSIQLVNLISNAVNDTINVLPTITEGIPIVSTILDGINLGAAIKELLDEHDPLLKKELEAKVGVLAINMSLSIAATVASIVGIGAEVTIFLLPIAGISAGIPSLVNNELILHDKATSVVNYFNHLSESKKYGPLKTEDDKILVPIDDLVISEIDFNNNSIKLGTCNILAMEGGSGHTVTGNIDHFFSSPSISSHIPSLSIYSAIGIETENLDFSKKIMMLPNAPSRVFWWETGAVPGLRSLENDGTRLLDSIRDLYPGKFYWRFYAFFDYAITTLKPVYEDTNIKIKLDKDTRNFIMPTITTNEIRNKLSYSFDGAGGTYSLLLSSYPISTNINLSKDDLWIFNIDNEVREISIENGTIKKGKLIKDVLSKIDINKNKLIIGNQTIDFSGDIDNKDRYIFLTCELDDKISLIIEINLVAKSYSLLLSGDKNYLISNLSNTIEKINTLGLDSKNIAYNYTDESNNKYFGAISKTSQKSIIHYKKDSKNILEFYNDSTLEFNSKDFIAEDINVFMKDDINTITGKYYVDNNTDKSIDFSISLVSKNQVKVNGLYLNESVYSSYLDFVKNSDGHHNTSNFMNLFLDNISFWKLFGFENINFVIDKYFTLVGKTNLGYVEFICDNNKNIDIYFGEWKTSSSKSTIFSGNGRNVVVEPIYNPDTGEDISTSLDFSYEPLYGIDRYINKVLIAPDLYTSLININTNYYSNEYYPEIIVLNPNTFHKKVNINLDSSSFEYKWSTEGSDFILVRYLEESNKKILQKIRIKGILSNTQSFNKMSIDFKDIKKLSLGYIMSNFKSFNSENELDRDHLGFKIIDNKTYYYDEDSKLVKGLININNSLFYFDPIEFNLVTGWQTINGKKYYFDINTGAALTSYKIINGKHFYFNNDGVMQLGVFKGPDGFEYFAPANTQNNNIEGQAIVYQSKFLTLNGKKYYFDNNSKAVTGWRIINNEKYYFNPNNAIAAVGLQVIDNNKYYFNPDTAIISKGWQTVNGSRYYFDTDTAIAFNGYKTIDGKHFYFDSDCVVKIGVFSTSNGFEYFAPANTYNNNIEGQAIVYQSKFLTLNGKKYYFDNNSKAVTGLQTIDSKKYYFNTNTAEAATGWQTIDGKKYYFNTNTAEAATGWQTIDGKKYYFNTNTAIASTGYTIINGKHFYFNTDGIMQIGVFKGPNGFEYFAPANTDANNIEGQAILYQNEFLTLNGKKYYFGSDSKAVTGWRIINNKKYYFNPNNAIAAIHLCTINNDKYYFSYDGILQNGYITIERNNFYFDANNESKMVTGVFKGPNGFEYFAPANTHNNNIEGQAIVYQNKFLTLNGKKYYFDNDSKAVTGWQTIDGKKYYFNLNTAEAATGWQTIDGKKYYFNLNTAEAATGWQTIDGKKYYFNTNTFIASTGYTSINGKHFYFNTDGIMQIGVFKGPNGFEYFAPANTDANNIEGQAILYQNKFLTLNGKKYYFGSDSKAVTGLRTIDGKKYYFNTNTAVAVTGWQTINGKKYYFNTNTSIASTGYTIISGKHFYFNTDGIMQIGVFKGPDGFEYFAPANTDANNIEGQAIRYQNRFLYLHDNIYYFGNNSKAATGWVTIDGNRYYFEPNTAMGANGYKTIDNKNFYFRNGLPQIGVFKGSNGFEYFAPANTDANNIEGQAIRYQNRFLHLLGKIYYFGNNSKAVTGWQTINGKVYYFMPDTAMAAAGGLFEIDGVIYFFGVDGVKAPGIYG

SEQ ID NO: 204 - protein, 2709 aa, Artificial Sequence
  Synthetic amino acid sequence
GSLISKEELIKLAYSIRPRENEYKTILTNLDEYNKLTTNNNENKYLQLKKLNESIDVFMNKYKTSSRNRALSNLKKDILKEVILIKNSNTSPVEKNLHFVIGGEVSDIALEYIKQWADINAEYNIKLWYDSEAFLVNTLKKAIVESSTTEALQLLEEEIQNPQFDNMKFYKKRMEFIYDRQKRFINYYKSQINKPTVPTIDDIIKSHLVSEYNRDETVLESYRTNSLRKINSNHGIDIRANSLFTEQELLNIYSQELLNRGNLAAASDIVRLLALKNFGGVYLDVDMLPGIHSDLFKTISRPSSIGLDRWEMIKLEAIMKYKKYINNYTSENFDKLDQQLKDNFKLIIESKSEKSEIFSKLENLNVSDLEIKIAFALGSVINQALISKQGSYLTNLVIEQVKNRYQFLNQHLNPAIESDNNFTDTTKIFHDSLFNSATAENSMFLTKIAPYLQVGFMPEARSTISLSGPGAYASAYYDFINLQENTIEKTLKASDLIEFKFPENNLSQLTEQEINSLWSFDQASAKYQFEKYVRDYTGGSLSEDNGVDFNKNTALDKNYLLNNKIPSNNVEEAGSKNYVHYIIQLQGDDISYEATCNLFSKNPKNSIIIQRNMNESAKSYFLSDDGESILELNKYRIPERLKNKEKVKVTFIGHGKDEFNTSEFARLSVDSLSNEISSFLDTIKLDISPKNVEVNLLGCNMFSYDFNVEETYPGKLLLSIMDKITSTLPDVNKNSITIGANQYEVRINSEGRKELLAHSGKWINKEEAIMSDLSSKEYIFFDSIDNKLKAKSKNIPGLASISEDIKTLLLDASVSPDTKFILNNLKLNIESSIGDYIYYEKLEPVKNIIHNSIDDLIDEFNLLENVSDELYELKKLNNLDEKYLISFEDISKNNSTYSVRFINKSNGESVYVETEKEIFSKYSEHITKEISTIKNSIITDVNGNLLDNIQLDHTSQVNTLNAAFFIQSLIDYSSNKDVLNDLSTSVKVQLYAQLFSTGLNTIYDSIQLVNLISNAVNDTINVLPTITEGIPIVSTILDGINLGAAIKELLDEHDPLLKKELEAKVGVLAINMSLSIAATVASIVGIGAEVTIFLLPIAGISAGIPSLVNNELILHDKATSVVNYFNHLSESKKYGPLKTEDDKILVPIDDLVISEIDFNNNSIKLGTCNILAMEGGSGHTVTGNIDHFFSSPSISSHIPSLSIYSAIGIETENLDFSKKIMMLPNAPSRVFWWETGAVPGLRSLENDGTRLLDSIRDLYPGKFYWRFYAFFDYAITTLKPVYEDTNIKIKLDKDTRNFIMPTITTNEIRNKLSYSFDGAGGTYSLLLSSYPISTNINLSKDDLWIFNIDNEVREISIENGTIKKGKLIKDVLSKIDINKNKLIIGNQTIDFSGDIDNKDRYIFLTCELDDKISLIIEINLVAKSYSLLLSGDKNYLISNLSNTIEKINTLGLDSKNIAYNYTDESNNKYFGAISKTSQKSIIHYKKDSKNILEFYNDSTLEFNSKDFIAEDINVFMKDDINTITGKYYVDNNTDKSIDFSISLVSKNQVKVNGLYLNESVYSSYLDFVKNSDGHHNTSNFMNLFLDNISFWKLFGFENINFVIDKYFTLVGKTNLGYVEFICDNNKNIDIYFGEWKTSSSKSTIFSGNGRNVVVEPIYNPDTGEDISTSLDFSYEPLYGIDRYINKVLIAPDLYTSLININTNYYSNEYYPEIIVLNPNTFHKKVNINLDSSSFEYKWSTEGSDFILVRYLEESNKKILQKIRIKGILSNTQSFNKMSIDFKDIKKLSLGYIMSNFKSFNSENELDRDHLGFKIIDNKTYYYDEDSKLVKGLININNSLFYFDPIEFNLVTGWQTINGKKYYFDINTGAALTSYKIINGKHFYFNNDGVMQLGVFKGPDGFEYFAPANTQNNNIEGQAIVYQSKFLTLNGKKYYFDNNSKAVTGWRIINNEKYYFNPNNAIAAVGLQVIDNNKYYFNPDTAIISKGWQTVNGSRYYFDTDTAIAFNGYKTIDGKHFYFDSDCVVKIGVFSTSNGFEYFAPANTYNNNIEGQAIVYQSKFLTLNGKKYYFDNNSKAVTGLQTIDSKKYYFNTNTAEAATGWQTIDGKKYYFNTNTAEAATGWQTIDGKKYYFNTNTAIASTGYTIINGKHFYFNTDGIMQIGVFKGPNGFEYFAPANTDANNIEGQAILYQNEFLTLNGKKYYFGSDSKAVTGWRIINNKKYYFNPNNAIAAIHLCTINNDKYYFSYDGILQNGYITIERNNFYFDANNESKMVTGVFKGPNGFEYFAPANTHNNNIEGQAIVYQNKFLTLNGKKYYFDNDSKAVTGWQTIDGKKYYFNLNTAEAATGWQTIDGKKYYFNLNTAEAATGWQTIDGKKYYFNTNTFIASTGYTSINGKHFYFNTDGIMQIGVFKGPNGFEYFAPANTDANNIEGQAILYQNKFLTLNGKKYYFGSDSKAVTGLRTIDGKKYYFNTNTAVAVTGWQTINGKKYYFNTNTSIASTGYTIISGKHFYFNTDGIMQIGVFKGPDGFEYFAPANTDANNIEGQAIRYQNRFLYLHDNIYYFGNNSKAATGWVTIDGNRYYFEPNTAMGANGYKTIDNKNFYFRNGLPQIGVFKGSNGFEYFAPANTDANNIEGQAIRYQNRFLHLLGKIYYFGNNSKAVTGWQTINGKVYYFMPDTAMAAAGGLFEIDGVIYFFGVDGVKAPGIYG

SEQ ID NO: 205 - protein, 2709 aa, Artificial Sequence
  Synthetic amino acid sequence
SLISKEELIKLAYSIRPRENEYKTILTNLDEYNKLTTNNNENKYLQLKKLNESIDVFMNKYKTSSRNRALSNLKKDILKEVILIKNSNTSPVEKNLHFVAIGGEVSDIALEYIKQWADINAEYNIKLWYDSEAFLVNTLKKAIVESSTTEALQLLEEEIQNPQFDNMKFYKKRMEFIYDRQKRFINYYKSQINKPTVPTIDDIIKSHLVSEYNRDETVLESYRTNSLRKINSNHGIDIRANSLFTEQELLNIYSQELLNRGNLAAASDIVRLLALKNFGGVYLDVAMLPGIHSDLFKTISRPSSIGLDRWEMIKLEAIMKYKKYINNYTSENFDKLDQQLKDNFKLIIESKSEKSEIFSKLENLNVSDLEIKIAFALGSVINQALISKQGSYLTNLVIEQVKNRYQFLNQHLNPAIESDNNFTDTTKIFHDSLFNSATAENSMFLTKIAPYLQVGFMPEARSTISLSGPGAYASAYYDFINLQENTIEKTLKASDLIEFKFPENNLSQLTEQQINSLWSFDQASAKYQFEKYVRDYTGGSLSEDNGVDFNKNTALDKNYLLNNKIPSNNVEEAGSKNYVHYIIQLQGDDISYEATCNLFSKNPKNSIIIQRNMNESAKSYFLSDDGESILELNKYRIPERLKNKEKVKVTFIGHGKDEFNTSEFARLSVDSLSNEISSFLDTIKLDISPKNVEVNLLGCNMFSYDFNVEETYPGKLLLSIMDKITSTLPDVNKNSITIGANQYEVRINSEGRKELLAHSGKWINKEEAIMSDLSSKEYIFFDSIDNKLKAKSKNIPGLASISEDIKTLLLDASVSPDTKFILNNLKLNIESSIGDYIYYEKLEPVKNIIHNSIDDLIDEFNLLENVSDELYELKKLNNLDEKYLISFEDISKNNSTYSVRFINKSNGESVYVETEKEIFSKYSEHITKEISTIKNSIITDVNGNLLDNIQLDHTSQVNTLNAAFFIQSLIDYSSNKDVLNDLSTSVKVQLYAQLFSTGLNTIYDSIQLVNLISNAVNDTINVLPTITEGIPIVSTILDGINLGAAIKELLDEHDPLLKKELEAKVGVLAINMSLSIAATVASIVGIGAEVTIFLLPIAGISAGIPSLVNNELILHDKATSVVNYFNHLSESKKYGPLKTEDDKILVPIDDLVISEIDFNNNSIKLGTCNILAMEGGSGHTVTGNIDHFFSSPSISSHIPSLSIYSAIGIETENLDFSKKIMMLPNAPSRVFWWETGAVPGLRSLENDGTRLLDSIRDLYPGKFYWRFYAFFDYAITTLKPVYEDTNIKIKLDKDTRNFIMPTITTNEIRNKLSYSFDGAGGTYSLLLSSYPISTNINLSKDDLWIFNIDNEVREISIENGTIKKGKLIKDVLSKIDINKNKLIIGNQTIDFSGDIDNKDRYIFLTCELDDKISLIIEINLVAKSYSLLLSGDKNYLISNLSNTIEKINTLGLDSKNIAYNYTDESNNKYFGAISKTSQKSIIHYKKDSKNILEFYNDSTLEFNSKDFIAEDINVFMKDDINTITGKYYVDNNTDKSIDFSISLVSKNQVKVNGLYLNESVYSSYLDFVKNSDGHHNTSNFMNLFLDNISFWKLFGFENINFVIDKYFTLVGKTNLGYVEFICDNNKNIDIYFGEWKTSSSKSTIFSGNGRNVVVEPIYNPDTGEDISTSLDFSYEPLYGIDRYINKVLIAPDLYTSLININTNYYSNEYYPEIIVLNPNTFHKKVNINLDSSSFEYKWSTEGSDFILVRYLEESNKKILQKIRIKGILSNTQSFNKMSIDFKDIKKLSLGYIMSNFKSFNSENELDRDHLGFKIIDNKTYYYDEDSKLVKGLININNSLFYFDPIEFNLVTGWQTINGKKYYFDINTGAALTSYKIINGKHFYFNNDGVMQLGVFKGPDGFEYFAPANTQNNNIEGQAIVYQSKFLTLNGKKYYFDNNSKAVTGWRIINNEKYYFNPNNAIAAVGLQVIDNNKYYFNPDTAIISKGWQTVNGSRYYFDTDTAIAFNGYKTIDGKHFYFDSDCVVKIGVFSTSNGFEYFAPANTYNNNIEGQAIVYQSKFLTLNGKKYYFDNNSKAVTGLQTIDSKKYYFNTNTAEAATGWQTIDGKKYYFNTNTAEAATGWQTIDGKKYYFNTNTAIASTGYTIINGKHFYFNTDGIMQIGVFKGPNGFEYFAPANTDANNIEGQAILYQNEFLTLNGKKYYFGSDSKAVTGWRIINNKKYYFNPNNAIAAIHLCTINNDKYYFSYDGILQNGYITIERNNFYFDANNESKMVTGVFKGPNGFEYFAPANTHNNNIEGQAIVYQNKFLTLNGKKYYFDNDSKAVTGWQTIDGKKYYFNLNTAEAATGWQTIDGKKYYFNLNTAEAATGWQTIDGKKYYFNTNTFIASTGYTSINGKHFYFNTDGIMQIGVFKGPNGFEYFAPANTDANNIEGQAILYQNKFLTLNGKKYYFGSDSKAVTGLRTIDGKKYYFNTNTAVAVTGWQTINGKKYYFNTNTSIASTGYTIISGKHFYFNTDGIMQIGVFKGPDGFEYFAPANTDANNIEGQAIRYQNRFLYLHDNIYYFGNNSKAATGWVTIDGNRYYFEPNTAMGANGYKTIDNKNFYFRNGLPQIGVFKGSNGFEYFAPANTDANNIEGQAIRYQNRFLHLLGKIYYFGNNSKAVTGWQTINGKVYYFMPDTAMAAAGGLFEIDGVIYFFGVDGVKAPGIYG

SEQ ID NO: 206 - protein, 2709 aa, Artificial Sequence
  Synthetic amino acid sequence
SLISKEELIKLAYSIRPRENEYKTILTNLDEYNKLTTNNNENKYLQLKKLNESIDVFMNKYKTSSRNRALSNLKKDILKEVILIKNSNTSPVEKNLHFVAIGGEVSDIALEYIKQWADINAEYNIKLWYDSEAFLVNTLKKAIVESSTTEALQLLEEEIQNPQFDNMKFYKKRMEFIYDRQKRFINYYKSQINKPTVPTIDDIIKSHLVSEYNRDETVLESYRTNSLRKINSNHGIDIRANSLFTEQELLNIYSQELLNRGNLAAASDIVRLLALKNFGGVYLAVAMLPGIHSDLFKTISRPSSIGLDRWEMIKLEAIMKYKKYINNYTSENFDKLDQQLKDNFKLIIESKSEKSEIFSKLENLNVSDLEIKIAFALGSVINQALISKQGSYLTNLVIEQVKNRYQFLNQHLNPAIESDNNFTDTTKIFHDSLFNSATAENSMFLTKIAPYLQVGFMPEARSTISLSGPGAYASAYYDFINLQENTIEKTLKASDLIEFKFPENNLSQLTEQQINSLWSFDQASAKYQFEKYVRDYTGGSLSEDNGVDFNKNTALDKNYLLNNKIPSNNVEEAGSKNYVHYIIQLQGDDISYEATCNLFSKNPKNSIIIQRNMNESAKSYFLSDDGESILELNKYRIPERLKNKEKVKVTFIGHGKDEFNTSEFARLSVDSLSNEISSFLDTIKLDISPKNVEVNLLGCNMFSYDFNVEETYPGKLLLSIMDKITSTLPDVNKNSITIGANQYEVRINSEGRKELLAHSGKWINKEEAIMSDLSSKEYIFFDSIDNKLKAKSKNIPGLASISEDIKTLLLDASVSPDTKFILNNLKLNIESSIGDYIYYEKLEPVKNIIHNSIDDLIDEFNLLENVSDELYELKKLNNLDEKYLISFEDISKNNSTYSVRFINKSNGESVYVETEKEIFSKYSEHITKEISTIKNSIITDVNGNLLDNIQLDHTSQVNTLNAAFFIQSLIDYSSNKDVLNDLSTSVKVQLYAQLFSTGLNTIYDSIQLVNLISNAVNDTINVLPTITEGIPIVSTILDGINLGAAIKELLDEHDPLLKKELEAKVGVLAINMSLSIAATVASIVGIGAEVTIFLLPIAGISAGIPSLVNNELILHDKATSVVNYFNHLSESKKYGPLKTEDDKILVPIDDLVISEIDFNNNSIKLGTCNILAMEGGSGHTVTGNIDHFFSSPSISSHIPSLSIYSAIGIETENLDFSKKIMMLPNAPSRVFWWETGAVPGLRSLENDGTRLLDSIRDLYPGKFYWRFYAFFDYAITTLKPVYEDTNIKIKLDKDTRNFIMPTITTNEIRNKLSYSFDGAGGTYSLLLSSYPISTNINLSKDDLWIFNIDNEVREISIENGTIKKGKLIKDVLSKIDINKNKLIIGNQTIDFSGDIDNKDRYIFLTCELDDKISLIIEINLVAKSYSLLLSGDKNYLISNLSNTIEKINTLGLDSKNIAYNYTDESNNKYFGAISKTSQKSIIHYKKDSKNILEFYNDSTLEFNSKDFIAEDINVFMKDDINTITGKYYVDNNTDKSIDFSISLVSKNQVKVNGLYLNESVYSSYLDFVKNSDGHHNTSNFMNLFLDNISFWKLFGFENINFVIDKYFTLVGKTNLGYVEFICDNNKNIDIYFGEWKTSSSKSTIFSGNGRNVVVEPIYNPDTGEDISTSLDFSYEPLYGIDRYINKVLIAPDLYTSLININTNYYSNEYYPEIIVLNPNTFHKKVNINLDSSSFEYKWSTEGSDFILVRYLEESNKKILQKIRIKGILSNTQSFNKMSIDFKDIKKLSLGYIMSNFKSFNSENELDRDHLGFKIIDNKTYYYDEDSKLVKGLININNSLFYFDPIEFNLVTGWQTINGKKYYFDINTGAALTSYKIINGKHFYFNNDGVMQLGVFKGPDGFEYFAPANTQNNNIEGQAIVYQSKFLTLNGKKYYFDNNSKAVTGWRIINNEKYYFNPNNAIAAVGLQVIDNNKYYFNPDTAIISKGWQTVNGSRYYFDTDTAIAFNGYKTIDGKHFYFDSDCVVKIGVFSTSNGFEYFAPANTYNNNIEGQAIVYQSKFLTLNGKKYYFDNNSKAVTGLQTIDSKKYYFNTNTAEAATGWQTIDGKKYYFNTNTAEAATGWQTIDGKKYYFNTNTAIASTGYTIINGKHFYFNTDGIMQIGVFKGPNGFEYFAPANTDANNIEGQAILYQNEFLTLNGKKYYFGSDSKAVTGWRIINNKKYYFNPNNAIAAIHLCTINNDKYYFSYDGILQNGYITIERNNFYFDANNESKMVTGVFKGPNGFEYFAPANTHNNNIEGQAIVYQNKFLTLNGKKYYFDNDSKAVTGWQTIDGKKYYFNLNTAEAATGWQTIDGKKYYFNLNTAEAATGWQTIDGKKYYFNTNTFIASTGYTSINGKHFYFNTDGIMQIGVFKGPNGFEYFAPANTDANNIEGQAILYQNKFLTLNGKKYYFGSDSKAVTGLRTIDGKKYYFNTNTAVAVTGWQTINGKKYYFNTNTSIASTGYTIISGKHFYFNTDGIMQIGVFKGPDGFEYFAPANTDANNIEGQAIRYQNRFLYLHDNIYYFGNNSKAATGWVTIDGNRYYFEPNTAMGANGYKTIDNKNFYFRNGLPQIGVFKGSNGFEYFAPANTDANNIEGQAIRYQNRFLHLLGKIYYFGNNSKAVTGWQTINGKVYYFMPDTAMAAAGGLFEIDGVIYFFGVDGVKAPGIYG

SEQ ID NO: 207 - protein, 2709 aa, Artificial Sequence
  Synthetic amino acid sequence
SLISKEELIKLAYSIRPRENEYKTILTNLDEYNKLTTNNNENKYLQLKKLNESIDVFMNKYKTSSRNRALSNLKKDILKEVILIKNSNTSPVEKNLHFVAIGGEVSDIALEYIKQWADINAEYNIKLWYDSEAFLVNTLKKAIVESSTTEALQLLEEEIQNPQFDNMKFYKKRMEFIYDRQKRFINYYKSQINKPTVPTIDDIIKSHLVSEYNRDETVLESYRTNSLRKINSNHGIDIRANSLFTEQELLNIYSQELLNRGNLAAASDIVRLLALKNFGGVYLDVAMLPGIHSDLFKTISRPSSIGLDRWEMIKLEAIMKYKKYINNYTSENFDKLDQQLKDNFKLIIESKSEKSEIFSKLENLNVSDLEIKIAFALGSVINQALISKQGSYLTNLVIEQVKNRYQFLNQHLNPAIESDNNFTDTTKIFHDSLFNSATAENSMFLTKIAPYLQVGFMPEARSTISLSGPGAYASAYYDFINLQENTIEKTLKASDLIEFKFPENNLSQLTEQQINALWSFDQASAKYQFEKYVRDYTGGSLSEDNGVDFNKNTALDKNYLLNNKIPSNNVEEAGSKNYVHYIIQLQGDDISYEATCNLFSKNPKNSIIIQRNMNESAKSYFLSDDGESILELNKYRIPERLKNKEKVKVTFIGHGKDEFNTSEFARLSVDSLSNEISSFLDTIKLDISPKNVEVNLLGCNMFSYDFNVEETYPGKLLLSIMDKITSTLPDVNKNSITIGANQYEVRINSEGRKELLAHSGKWINKEEAIMSDLSSKEYIFFDSIDNKLKAKSKNIPGLASISEDIKTLLLDASVSPDTKFILNNLKLNIESSIGDYIYYEKLEPVKNIIHNSIDDLIDEFNLLENVSDELYELKKLNNLDEKYLISFEDISKNNSTYSVRFINKSNGESVYVETEKEIFSKYSEHITKEISTIKNSIITDVNGNLLDNIQLDHTSQVNTLNAAFFIQSLIDYSSNKDVLNDLSTSVKVQLYAQLFSTGLNTIYDSIQLVNLISNAVNDTINVLPTITEGIPIVSTILDGINLGAAIKELLDEHDPLLKKELEAKVGVLAINMSLSIAATVASIVGIGAEVTIFLLPIAGISAGIPSLVNNELILHDKATSVVNYFNHLSESKKYGPLKTEDDKILVPIDDLVISEIDFNNNSIKLGTCNILAMEGGSGHTVTGNIDHFFSSPSISSHIPSLSIYSAIGIETENLDFSKKIMMLPNAPSRVFWWETGAVPGLRSLENDGTRLLDSIRDLYPGKFYWRFYAFFDYAITTLKPVYEDTNIKIKLDKDTRNFIMPTITTNEIRNKLSYSFDGAGGTYSLLLSSYPISTNINLSKDDLWIFNIDNEVREISIENGTIKKGKLIKDVLSKIDINKNKLIIGNQTIDFSGDIDNKDRYIFLTCELDDKISLIIEINLVAKSYSLLLSGDKNYLISNLSNTIEKINTLGLDSKNIAYNYTDESNNKYFGAISKTSQKSIIHYKKDSKNILEFYNDSTLEFNSKDFIAEDINVFMKDDINTITGKYYVDNNTDKSIDFSISLVSKNQVKVNGLYLNESVYSSYLDFVKNSDGHHNTSNFMNLFLDNISFWKLFGFENINFVIDKYFTLVGKTNLGYVEFICDNNKNIDIYFGEWKTSSSKSTIFSGNGRNVVVEPIYNPDTGEDISTSLDFSYEPLYGIDRYINKVLIAPDLYTSLININTNYYSNEYYPEIIVLNPNTFHKKVNINLDSSSFEYKWSTEGSDFILVRYLEESNKKILQKIRIKGILSNTQSFNKMSIDFKDIKKLSLGYIMSNFKSFNSENELDRDHLGFKIIDNKTYYYDEDSKLVKGLININNSLFYFDPIEFNLVTGWQTINGKKYYFDINTGAALTSYKIINGKHFYFNNDGVMQLGVFKGPDGFEYFAPANTQNNNIEGQAIVYQSKFLTLNGKKYYFDNNSKAVTGWRIINNEKYYFNPNNAIAAVGLQVIDNNKYYFNPDTAIISKGWQTVNGSRYYFDTDTAIAFNGYKTIDGKHFYFDSDCVVKIGVFSTSNGFEYFAPANTYNNNIEGQAIVYQSKFLTLNGKKYYFDNNSKAVTGLQTIDSKKYYFNTNTAEAATGWQTIDGKKYYFNTNTAEAATGWQTIDGKKYYFNTNTAIASTGYTIINGKHFYFNTDGIMQIGVFKGPNGFEYFAPANTDANNIEGQAILYQNEFLTLNGKKYYFGSDSKAVTGWRIINNKKYYFNPNNAIAAIHLCTINNDKYYFSYDGILQNGYITIERNNFYFDANNESKMVTGVFKGPNGFEYFAPANTHNNNIEGQAIVYQNKFLTLNGKKYYFDNDSKAVTGWQTIDGKKYYFNLNTAEAATGWQTIDGKKYYFNLNTAEAATGWQTIDGKKYYFNTNTFIASTGYTSINGKHFYFNTDGIMQIGVFKGPNGFEYFAPANTDANNIEGQAILYQNKFLTLNGKKYYFGSDSKAVTGLRTIDGKKYYFNTNTAVAVTGWQTINGKKYYFNTNTSIASTGYTIISGKHFYFNTDGIMQIGVFKGPDGFEYFAPANTDANNIEGQAIRYQNRFLYLHDNIYYFGNNSKAATGWVTIDGNRYYFEPNTAMGANGYKTIDNKNFYFRNGLPQIGVFKGSNGFEYFAPANTDANNIEGQAIRYQNRFLHLLGKIYYFGNNSKAVTGWQTINGKVYYFMPDTAMAAAGGLFEIDGVIYFFGVDGVKAPGIYG

SEQ ID NO: 208 - protein, 2709 aa, Artificial Sequence
  Synthetic amino acid sequence
SLISKEELIKLAYSIRPRENEYKTILTNLDEYNKLTTNNNENKYLQLKKLNESIDVFMNKYKTSSRNRALSNLKKDILKEVILIKNSNTSPVEKNLHFVAIGGEVSDIALEYIKQWADINAEYNIKLWYDSEAFLVNTLKKAIVESSTTEALQLLEEEIQNPQFDNMKFYKKRMEFIYDRQKRFINYYKSQINKPTVPTIDDIIKSHLVSEYNRDETVLESYRTNSLRKINSNHGIDIRANSLFTEQELLNIYSQELLNRGNLAAASDIVRLLALKNFGGVYLDVAMLPGIHSDLFKTISRPSSIGLDRWEMIKLEAIMKYKKYINNYTSENFDKLDQQLKDNFKLIIESKSEKSEIFSKLENLNVSDLEIKIAFALGSVINQALISKQGSYLTNLVIEQVKNRYQFLNQHLNPAIESDNNFTDTTKIFHDSLFNSATAENSMFLTKIAPYLQVGFMPEARSTISLSGPGAYASAYYDFINLQENTIEKTLKASDLIEFKFPENNLSQLTEQQINSLASFDQASAKYQFEKYVRDYTGGSLSEDNGVDFNKNTALDKNYLLNNKIPSNNVEEAGSKNYVHYIIQLQGDDISYEATCNLFSKNPKNSIIIQRNMNESAKSYFLSDDGESILELNKYRIPERLKNKEKVKVTFIGHGKDEFNTSEFARLSVDSLSNEISSFLDTIKLDISPKNVEVNLLGCNMFSYDFNVEETYPGKLLLSIMDKITSTLPDVNKNSITIGANQYEVRINSEGRKELLAHSGKWINKEEAIMSDLSSKEYIFFDSIDNKLKAKSKNIPGLASISEDIKTLLLDASVSPDTKFILNNLKLNIESSIGDYIYYEKLEPVKNIIHNSIDDLIDEFNLLENVSDELYELKKLNNLDEKYLISFEDISKNNSTYSVRFINKSNGESVYVETEKEIFSKYSEHITKEISTIKNSIITDVNGNLLDNIQLDHTSQVNTLNAAFFIQSLIDYSSNKDVLNDLSTSVKVQLYAQLFSTGLNTIYDSIQLVNLISNAVNDTINVLPTITEGIPIVSTILDGINLGAAIKELLDEHDPLLKKELEAKVGVLAINMSLSIAATVASIVGIGAEVTIFLLPIAGISAGIPSLVNNELILHDKATSVVNYFNHLSESKKYGPLKTEDDKILVPIDDLVISEIDFNNNSIKLGTCNILAMEGGSGHTVTGNIDHFFSSPSISSHIPSLSIYSAIGIETENLDFSKKIMMLPNAPSRVFWWETGAVPGLRSLENDGTRLLDSIRDLYPGKFYWRFYAFFDYAITTLKPVYEDTNIKIKLDKDTRNFIMPTITTNEIRNKLSYSFDGAGGTYSLLLSSYPISTNINLSKDDLWIFNIDNEVREISIENGTIKKGKLIKDVLSKIDINKNKLIIGNQTIDFSGDIDNKDRYIFLTCELDDKISLIIEINLVAKSYSLLLSGDKNYLISNLSNTIEKINTLGLDSKNIAYNYTDESNNKYFGAISKTSQKSIIHYKKDSKNILEFYNDSTLEFNSKDFIAEDINVFMKDDINTITGKYYVDNNTDKSIDFSISLVSKNQVKVNGLYLNESVYSSYLDFVKNSDGHHNTSNFMNLFLDNISFWKLFGFENINFVIDKYFTLVGKTNLGYVEFICDNNKNIDIYFGEWKTSSSKSTIFSGNGRNVVVEPIYNPDTGEDISTSLDFSYEPLYGIDRYINKVLIAPDLYTSLININTNYYSNEYYPEIIVLNPNTFHKKVNINLDSSSFEYKWSTEGSDFILVRYLEESNKKILQKIRIKGILSNTQSFNKMSIDFKDIKKLSLGYIMSNFKSFNSENELDRDHLGFKIIDNKTYYYDEDSKLVKGLININNSLFYFDPIEFNLVTGWQTINGKKYYFDINTGAALTSYKIINGKHFYFNNDGVMQLGVFKGPDGFEYFAPANTQNNNIEGQAIVYQSKFLTLNGKKYYFDNNSKAVTGWRIINNEKYYFNPNNAIAAVGLQVIDNNKYYFNPDTAIISKGWQTVNGSRYYFDTDTAIAFNGYKTIDGKHFYFDSDCVVKIGVFSTSNGFEYFAPANTYNNNIEGQAIVYQSKFLTLNGKKYYFDNNSKAVTGLQTIDSKKYYFNTNTAEAATGWQTIDGKKYYFNTNTAEAATGWQTIDGKKYYFNTNTAIASTGYTIINGKHFYFNTDGIMQIGVFKGPNGFEYFAPANTDANNIEGQAILYQNEFLTLNGKKYYFGSDSKAVTGWRIINNKKYYFNPNNAIAAIHLCTINNDKYYFSYDGILQNGYITIERNNFYFDANNESKMVTGVFKGPNGFEYFAPANTHNNNIEGQAIVYQNKFLTLNGKKYYFDNDSKAVTGWQTIDGKKYYFNLNTAEAATGWQTIDGKKYYFNLNTAEAATGWQTIDGKKYYFNTNTFIASTGYTSINGKHFYFNTDGIMQIGVFKGPNGFEYFAPANTDANNIEGQAILYQNKFLTLNGKKYYFGSDSKAVTGLRTIDGKKYYFNTNTAVAVTGWQTINGKKYYFNTNTSIASTGYTIISGKHFYFNTDGIMQIGVFKGPDGFEYFAPANTDANNIEGQAIRYQNRFLYLHDNIYYFGNNSKAATGWVTIDGNRYYFEPNTAMGANGYKTIDNKNFYFRNGLPQIGVFKGSNGFEYFAPANTDANNIEGQAIRYQNRFLHLLGKIYYFGNNSKAVTGWQTINGKVYYFMPDTAMAAAGGLFEIDGVIYFFGVDGVKAPGIYG

SEQ ID NO: 209 - protein, 2709 aa, Artificial Sequence
  Synthetic amino acid sequence
SLISKEELIKLAYSIRPRENEYKTILTNLDEYNKLTTNNNENKYLQLKKLNESIDVFMNKYKNSSRNRALSNLKKDILKEVILIKNSNTSPVEKNLHFVAIGGEVSDIALEYIKQWADINAEYNIKLWYDSEAFLVNTLKKAIVESSTTEALQLLEEEIQNPQFDNMKFYKKRMEFIYDRQKRFINYYKSQINKPTVPTIDDIIKSHLVSEYNRDETLLESYRTNSLRKINSNHGIDIRANSLFTEQELLNIYSQELLNRGNLAAASDIVRLLALKNFGGVYLDVAMLPGIHSDLFKTIPRPSSIGLDRWEMIKLEAIMKYKKYINNYTSENFDKLDQQLKDNFKLIIESKSEKSEIFSKLENLNVSDLEIKIAFALGSVINQALISKQGSYLTNLVIEQVKNRYQFLNQHLNPAIESDNNFTDTTKIFHDSLFNSATAENSMFLTKIAPYLQVGFMPEARSTISLSGPGAYASAYYDFINLQENTIEKTLKASDLIEFKFPENNLSQLTEQQINSLWSFDQASAKYQFEKYVRDYTGGSLSEDNGVDFNKNTALDKNYLLNNKIPSNNVEEAGSKNYVHYIIQLQGDDISYEATCNLFSKNPKNSIIIQRNMNESAKSYFLSDDGESILELNKYRIPERLKNKEKVKVTFIGHGKDEFNTSEFARLSVDSLSNEISSFLDTIKLDISPKNVEVNLLGCNMFSYDFNVEETYPGKLLLSIMDKITSTLPDVNKDSITIGANQYEVRINSEGRKELLAHSGKWINKEEAIMSDLSSKEYIFFDSIDNKLKAKSKNIPGLASISEDIKTLLLDASVSPDTKFILNNLKLNIESSIGDYIYYEKLEPVKNIIHNSIDDLIDEFNLLENVSDELYELKKLNNLDEKYLISFEDISKNNSTYSVRFINKSNGESVYVETEKEIFSKYSEHITKEISTIKNSIITDVNGNLLDNIQLDHTSQVNTLNAAFFIQSLIDYSSNKDVLNDLSTSVKVQLYAQLFSTGLNTIYDSIQLVNLISNAVNDTINVLPTITEGIPIVSTILDGINLGAAIKELLDEHDPLLKKELEAKVGVLAINMSLSIAATVASIVGIGAEVTIFLLPIAGISAGIPSLVNNELILHDKATSVVNYFNHLSESKEYGPLKTEDDKILVPIDDLVISEIDFNNNSIKLGTCNILAMEGGSGHTVTGNIDHFFSSPYISSHIPSLSVYSAIGIKTENLDFSKKIMMLPNAPSRVFWWETGAVPGLRSLENNGTKLLDSIRDLYPGKFYWRFYAFFDYAITTLKPVYEDTNTKIKLDKDTRNFIMPTITTDEIRNKLSYSFDGAGGTYSLLLSSYPISMNINLSKDDLWIFNIDNEVREISIENGTIKKGNLIEDVLSKIDINKNKLIIGNQTIDFSGDIDNKDRYIFLTCELDDKISLIIEINLVAKSYSLLLSGDKNYLISNLSNTIEKINTLGLDSKNIAYNYTDESNNKYFGAISKTSQKSIIHYKKDSKNILEFYNGSTLEFNSKDFIAEDINVFMKDDINTITGKYYVDNNTDKSIDFSISLVSKNQVKVNGLYLNESVYSSYLDFVKNSDGHHNTSNFMNLFLNNISFWKLFGFENINFVIDKYFTLVGKTNLGYVEFICDNNKNIDIYFGEWKTSSSKSTIFSGNGRNVVVEPIYNPDTGEDISTSLDFSYEPLYGIDRYINKVLIAPDLYTSLININTNYYSNEYYPEIIVLNPNTFHKKVNINLDSSSFEYKWSTEGSDFILVRYLEESNKKILQKIRIKGILSNTQSFNKMSIDFKDIKKLSLGYIMSNFKSFNSENELDRDHLGFKIIDNKTYYYDEDSKLVKGLININNSLFYFDPIESNLVTGWQTINGKKYYFDINTGAASTSYKIINGKHFYFNNNGVMQLGVFKGPDGFEYFAPANTQNNNIEGQAIVYQSKFLTLNGKKYYFDNDSKAVTGWRIINNEKYYFNPNNAIAAVGLQVIDNNKYYFNPDTAIISKGWQTVNGSRYYFDTDTAIAFNGYKTIDGKHFYFDSDCVVKIGVFSGSNGFEYFAPANTYNNNIEGQAIVYQSKFLTLNGKKYYFDNNSKAVTGWQTIDSKKYYFNTNTAEAATGWQTIDGKKYYFNTNTAEAATGWQTIDGKKYYFNTNTSIASTGYTIINGKYFYFNTDGIMQIGVFKVPNGFEYFAPANTHNNNIEGQAILYQNKFLTLNGKKYYFGSDSKAITGWQTIDGKKYYFNPNNAIAATHLCTINNDKYYFSYDGILQNGYITIERNNFYFDANNESKMVTGVFKGPNGFEYFAPANTHNNNIEGQAIVYQNKFLTLNGKKYYFDNDSKAVTGWQTIDSKKYYFNLNTAVAVTGWQTIDGEKYYFNLNTAEAATGWQTIDGKRYYFNTNTYIASTGYTIINGKHFYFNTDGIMQIGVFKGPDGFEYFAPANTHNNNIEGQAILYQNKFLTLNGKKYYFGSDSKAVTGLRTIDGKKYYFNTNTAVAVTGWQTINGKKYYFNTNTYIASTGYTIISGKHFYFNTDGIMQIGVFKGPDGFEYFAPANTDANNIEGQAIRYQNRFLYLHDNIYYFGNDSKAATGWATIDGNRYYFEPNTAMGANGYKTIDNKNFYFRNGLPQIGVFKGPNGFEYFAPANTDANNIDGQAIRYQNRFLHLLGKIYYFGNNSKAVTGWQTINSKVYYFMPDTAMAAAGGLFEIDGVIYFFGVDGVKAPGIYG

SEQ ID NO: 210 - protein, 2709 aa, Artificial Sequence
  Synthetic amino acid sequence
SLISKEELIKLAYSIRPRENEYKTILTNLDEYNKLTTNNNENKYLQLKKLNESIDVFMNKYKTSSRNRALSNLKKDILKEVILIKNSNTSPVEKNLHFVAIGGEVSDIALEYIKQWADINAEYNIKLWYDSEAFLVNTLKKAIVESSTTEALQLLEEEIQNPQFDNMKFYKKRMEFIYDRQKRFINYYKSQINKPTVPTIDDIIKSHLVSEYNRDETVLESYRTNSLRKINSNHGIDIRANSLFTEQELLNIYSQELLNRGNLAAASDIVRLLALKNFGGVYLDVAMLPGIHSDLFKTISRPSSIGLDRWEMIKLEAIMKYKKYINNYTSENFDKLDQQLKDNFKLIIESKSEKSEIFSKLENLNVSDLEIKIAFALGSVINQALISKQGSYLTNLVIEQVKNRYQFLNQHLNPAIESDNNFTDTTKIFHDSLFNSATAENSMFLTKIAPYLQVGFMPEARSTISLSGPGAYASAYYDFINLQENTIEKTLKASDLIEFKFPENNLSQLTEQQINSLASFDQASAKYQFEKYVRDYTGGSLSEDNGVDFNKNTALDKNYLLNNKIPSNNVEEAGSKNYVHYIIQLQGDDISYEATCNLFSKNPKNSIIIQRNMNESAKSYFLSDDGESILELNKYRIPERLKNKEKVKVTFIGHGKDEFNTSEFARLSVDSLSNEISSFLDTIKLDISPKNVEVNLLGANMFSYDFNVEETYPGKLLLSIMDKITSTLPDVNKNSITIGANQYEVRINSEGRKELLAHSGKWINKEEAIMSDLSSKEYIFFDSIDNKLKAKSKNIPGLASISEDIKTLLLDASVSPDTKFILNNLKLNIESSIGDYIYYEKLEPVKNIIHNSIDDLIDEFNLLENVSDELYELKKLNNLDEKYLISFEDISKNNSTYSVRFINKSNGESVYVETEKEIFSKYSEHITKEISTIKNSIITDVNGNLLDNIQLDHTSQVNTLNAAFFIQSLIDYSSNKDVLNDLSTSVKVQLYAQLFSTGLNTIYDSIQLVNLISNAVNDTINVLPTITEGIPIVSTILDGINLGAAIKELLDEHDPLLKKELEAKVGVLAINMSLSIAATVASIVGIGAEVTIFLLPIAGISAGIPSLVNNELILHDKATSVVNYFNHLSESKKYGPLKTEDDKILVPIDDLVISEIDFNNNSIKLGTCNILAMEGGSGHTVTGNIDHFFSSPSISSHIPSLSIYSAIGIETENLDFSKKIMMLPNAPSRVFWWETGAVPGLRSLENDGTRLLDSIRDLYPGKFYWRFYAFFDYAITTLKPVYEDTNIKIKLDKDTRNFIMPTITTNEIRNKLSYSFDGAGGTYSLLLSSYPISTNINLSKDDLWIFNIDNEVREISIENGTIKKGKLIKDVLSKIDINKNKLIIGNQTIDFSGDIDNKDRYIFLTCELDDKISLIIEINLVAKSYSLLLSGDKNYLISNLSNTIEKINTLGLDSKNIAYNYTDESNNKYFGAISKTSQKSIIHYKKDSKNILEFYNDSTLEFNSKDFIAEDINVFMKDDINTITGKYYVDNNTDKSIDFSISLVSKNQVKVNGLYLNESVYSSYLDFVKNSDGHHNTSNFMNLFLDNISFWKLFGFENINFVIDKYFTLVGKTNLGYVEFICDNNKNIDIYFGEWKTSSSKSTIFSGNGRNVVVEPIYNPDTGEDISTSLDFSYEPLYGIDRYINKVLIAPDLYTSLININTNYYSNEYYPEIIVLNPNTFHKKVNINLDSSSFEYKWSTEGSDFILVRYLEESNKKILQKIRIKGILSNTQSFNKMSIDFKDIKKLSLGYIMSNFKSFNSENELDRDHLGFKIIDNKTYYYDEDSKLVKGLININNSLFYFDPIEFNLVTGWQTINGKKYYFDINTGAALTSYKIINGKHFYFNNDGVMQLGVFKGPDGFEYFAPANTQNNNIEGQAIVYQSKFLTLNGKKYYFDNNSKAVTGWRIINNEKYYFNPNNAIAAVGLQVIDNNKYYFNPDTAIISKGWQTVNGSRYYFDTDTAIAFNGYKTIDGKHFYFDSDCVVKIGVFSTSNGFEYFAPANTYNNNIEGQAIVYQSKFLTLNGKKYYFDNNSKAVTGLQTIDSKKYYFNTNTAEAATGWQTIDGKKYYFNTNTAEAATGWQTIDGKKYYFNTNTAIASTGYTIINGKHFYFNTDGIMQIGVFKGPNGFEYFAPANTDANNIEGQAILYQNEFLTLNGKKYYFGSDSKAVTGWRIINNKKYYFNPNNAIAAIHLCTINNDKYYFSYDGILQNGYITIERNNFYFDANNESKMVTGVFKGPNGFEYFAPANTHNNNIEGQAIVYQNKFLTLNGKKYYFDNDSKAVTGWQTIDGKKYYFNLNTAEAATGWQTIDGKKYYFNLNTAEAATGWQTIDGKKYYFNTNTFIASTGYTSINGKHFYFNTDGIMQIGVFKGPNGFEYFAPANTDANNIEGQAILYQNKFLTLNGKKYYFGSDSKAVTGLRTIDGKKYYFNTNTAVAVTGWQTINGKKYYFNTNTSIASTGYTIISGKHFYFNTDGIMQIGVFKGPDGFEYFAPANTDANNIEGQAIRYQNRFLYLHDNIYYFGNNSKAATGWVTIDGNRYYFEPNTAMGANGYKTIDNKNFYFRNGLPQIGVFKGSNGFEYFAPANTDANNIEGQAIRYQNRFLHLLGKIYYFGNNSKAVTGWQTINGKVYYFMPDTAMAAAGGLFEIDGVIYFFGVDGVKAPGIYG

SEQ ID NO: 211 - protein, 718 aa, Artificial Sequence
  Synthetic amino acid sequence
SLISKEELIKLAYSIRPRENEYKTILTNLDEYNKLTTNNNENKYLQLKKLNESIDVFMNKYKTSSRNRALSNLKKDILKEVILIKNSNTSPVEKNLHFVWIGGEVSDIALEYIKQWADINAEYNIKLWYDSEAFLVNTLKKAIVESSTTEALQLLEEEIQNPQFDNMKFYKKRMEFIYDRQKRFINYYKSQINKPTVPTIDDIIKSHLVSEYNRDETVLESYRTNSLRKINSNHGIDIRANSLFTEQELLNIYSQELLNRGNLAAASDIVRLLALKNFGGVYLDVDMLPGIHSDLFKTISRPSSIGLDRWEMIKLEAIMKYKKYINNYTSENFDKLDQQLKDNFKLIIESKSEKSEIFSKLENLNVSDLEIKIAFALGSVINQALISKQGSYLTNLVIEQVKNRYQFLNQHLNPAIESDNNFTDTTKIFHDSLFNSATAENSMFLTKIAPYLQVGFMPEARSTISLSGPGAYASAYYDFINLQENTIEKTLKASDLIEFKFPENNLSQLTEQEINSLWSFDQASAKYQFEKYVRDYTGGSLSEDNGVDFNKNTALDKNYLLNNKIPSNNVEEAGSKNYVHYIIQLQGDDISYEATCNLFSKNPKNSIIIQRNMNESAKSYFLSDDGESILELNKYRIPERLKNKEKVKVTFIGHGKDEFNTSEFARLSVDSLSNEISSFLDTIKLDISPKNVEVNLLGCNMFSYDFNVEETYPGKLLL

SEQ ID NO: 212 - protein, 2709 aa, Artificial Sequence
  Synthetic amino acid sequence
  misc_feature (100)..(100): Xaa can be any naturally occurring amino acid
  VARIANT (101)..(101): Xaa is any amino acid, but not Trp
  VARIANT (286)..(286): Xaa is any amino acid, but not Asp
  VARIANT (513)..(513): Xaa is any amino acid, but not Glu
  VARIANT (518)..(518): Xaa is any amino acid, but not Trp
  VARIANT (699)..(699): Xaa is any amino acid, but not Cys
SLISKEELIKLAYSIRPRENEYKTILTNLDEYNKLTTNNNENKYLQLKKLNESIDVFMNKYKTSSRNRALSNLKKDILKEVILIKNSNTSPVEKNLHFVXIGGEVSDIALEYIKQWADINAEYNIKLWYDSEAFLVNTLKKAIVESSTTEALQLLEEEIQNPQFDNMKFYKKRMEFIYDRQKRFINYYKSQINKPTVPTIDDIIKSHLVSEYNRDETVLESYRTNSLRKINSNHGIDIRANSLFTEQELLNIYSQELLNRGNLAAASDIVRLLALKNFGGVYLDVXMLPGIHSDLFKTISRPSSIGLDRWEMIKLEAIMKYKKYINNYTSENFDKLDQQLKDNFKLIIESKSEKSEIFSKLENLNVSDLEIKIAFALGSVINQALISKQGSYLTNLVIEQVKNRYQFLNQHLNPAIESDNNFTDTTKIFHDSLFNSATAENSMFLTKIAPYLQVGFMPEARSTISLSGPGAYASAYYDFINLQENTIEKTLKASDLIEFKFPENNLSQLTEQXINSLXSFDQASAKYQFEKYVRDYTGGSLSEDNGVDFNKNTALDKNYLLNNKIPSNNVEEAGSKNYVHYIIQLQGDDISYEATCNLFSKNPKNSIIIQRNMNESAKSYFLSDDGESILELNKYRIPERLKNKEKVKVTFIGHGKDEFNTSEFARLSVDSLSNEISSFLDTIKLDISPKNVEVNLLGXNMFSYDFNVEETYPGKLLLSIMDKITSTLPDVNKNSITIGANQYEVRINSEGRKELLAHSGKWINKEEAIMSDLSSKEYIFFDSIDNKLKAKSKNIPGLASISEDIKTLLLDASVSPDTKFILNNLKLNIESSIGDYIYYEKLEPVKNIIHNSIDDLIDEFNLLENVSDELYELKKLNNLDEKYLISFEDISKNNSTYSVRFINKSNGESVYVETEKEIFSKYSEHITKEISTIKNSIITDVNGNLLDNIQLDHTSQVNTLNAAFFIQSLIDYSSNKDVLNDLSTSVKVQLYAQLFSTGLNTIYDSIQLVNLISNAVNDTINVLPTITEGIPIVSTILDGINLGAAIKELLDEHDPLLKKELEAKVGVLAINMSLSIAATVASIVGIGAEVTIFLLPIAGISAGIPSLVNNELILHDKATSVVNYFNHLSESKKYGPLKTEDDKILVPIDDLVISEIDFNNNSIKLGTCNILAMEGGSGHTVTGNIDHFFSSPSISSHIPSLSIYSAIGIETENLDFSKKIMMLPNAPSRVFWWETGAVPGLRSLENDGTRLLDSIRDLYPGKFYWRFYAFFDYAITTLKPVYEDTNIKIKLDKDTRNFIMPTITTNEIRNKLSYSFDGAGGTYSLLLSSYPISTNINLSKDDLWIFNIDNEVREISIENGTIKKGKLIKDVLSKIDINKNKLIIGNQTIDFSGDIDNKDRYIFLTCELDDKISLIIEINLVAKSYSLLLSGDKNYLISNLSNTIEKINTLGLDSKNIAYNYTDESNNKYFGAISKTSQKSIIHYKKDSKNILEFYNDSTLEFNSKDFIAEDINVFMKDDINTITGKYYVDNNTDKSIDFSISLVSKNQVKVNGLYLNESVYSSYLDFVKNSDGHHNTSNFMNLFLDNISFWKLFGFENINFVIDKYFTLVGKTNLGYVEFICDNNKNIDIYFGEWKTSSSKSTIFSGNGRNVVVEPIYNPDTGEDISTSLDFSYEPLYGIDRYINKVLIAPDLYTSLININTNYYSNEYYPEIIVLNPNTFHKKVNINLDSSSFEYKWSTEGSDFILVRYLEESNKKILQKIRIKGILSNTQSFNKMSIDFKDIKKLSLGYIMSNFKSFNSENELDRDHLGFKIIDNKTYYYDEDSKLVKGLININNSLFYFDPIEFNLVTGWQTINGKKYYFDINTGAALTSYKIINGKHFYFNNDGVMQLGVFKGPDGFEYFAPANTQNNNIEGQAIVYQSKFLTLNGKKYYFDNNSKAVTGWRIINNEKYYFNPNNAIAAVGLQVIDNNKYYFNPDTAIISKGWQTVNGSRYYFDTDTAIAFNGYKTIDGKHFYFDSDCVVKIGVFSTSNGFEYFAPANTYNNNIEGQAIVYQSKFLTLNGKKYYFDNNSKAVTGLQTIDSKKYYFNTNTAEAATGWQTIDGKKYYFNTNTAEAATGWQTIDGKKYYFNTNTAIASTGYTIINGKHFYFNTDGIMQIGVFKGPNGFEYFAPANTDANNIEGQAILYQNEFLTLNGKKYYFGSDSKAVTGWRIINNKKYYFNPNNAIAAIHLCTINNDKYYFSYDGILQNGYITIERNNFYFDANNESKMVTGVFKGPNGFEYFAPANTHNNNIEGQAIVYQNKFLTLNGKKYYFDNDSKAVTGWQTIDGKKYYFNLNTAEAATGWQTIDGKKYYFNLNTAEAATGWQTIDGKKYYFNTNTFIASTGYTSINGKHFYFNTDGIMQIGVFKGPNGFEYFAPANTDANNIEGQAILYQNKFLTLNGKKYYFGSDSKAVTGLRTIDGKKYYFNTNTAVAVTGWQTINGKKYYFNTNTSIASTGYTIISGKHFYFNTDGIMQIGVFKGPDGFEYFAPANTDANNIEGQAIRYQNRFLYLHDNIYYFGNNSKAATGWVTIDGNRYYFEPNTAMGANGYKTIDNKNFYFRNGLPQIGVFKGSNGFEYFAPANTDANNIEGQAIRYQNRFLHLLGKIYYFGNNSKAVTGWQTINGKVYYFMPDTAMAAAGGLFEIDGVIYFFGVDGVKAPGIYG

SEQ ID NO: 213 - protein, 2366 aa, Artificial Sequence
  Synthetic amino acid sequence
GSLVNRKQLEKMANVRFRTQEDEYVAILDALEEYHNMSENTVVEKYLKLKDINSLTDIYIDTYKKSGRNKALKKFKEYLVTEVLELKNNNLTPVEKNLHFVAIGGQINDTAINYINQWKDVNSDYNVNVFYDSNAFLINTLKKTVVESAINDTLESFRENLNDPRFDYNKFFRKRMEIIYDKQKNFINYYKAQREENPELIIDDIVKTYLSNEYSKEIDELNTYIEESLNKITQNSGNDVRNFEEFKNGESFNLYEQELVERWNLAAASDILRISALKEIGGMYLDVAMLPGIQPDLFESIEKPSSVTVDFWEMTKLEAIMKYKEYIPEYTSEHFDMLDEEVQSSFESVLASKSDKSEIFSSLGDMEASPLEVKIAFNSKGIINQGLISVKDSYCSNLIVKQIENRYKILNNSLNPAISEDNDFNTTTNTFIDSIMAEANADNGRFMMELGKYLRVGFFPDVKTTINLSGPEAYAAAYQDLLMFKEGSMNIHLIEADLRNFEISKTNISQSTEQQMASLWSFDDARAKAQFEEYKRNYFEGSLGEDDNLDFSQNIVVDKEYLLEKISSLARSSERGYIHYIVQLQGDKISYEAACNLFAKTPYDSVLFQKNIEDSEIAYYYNPGDGEIQEIDKYKIPSIISDRPKIKLTFIGHGKDEFNTDIFAGFDVDSLSTEIEAAIDLAKEDISPKSIEINLLGCNMFSYSINVEETYPGKLLLKVKDKISELMPSISQDSIIVSANQYEVRINSEGRRELLDHSGEWINKEESIIKDISSKEYISFNPKENKITVKSKNLPELSTLLQEIRNNSNSSDIELEEKVMLTECEINVISNIDTQIVEERIEEAKNLTSDSINYIKDEFKLIESISDALCDLKQQNELEDSHFISFEDISETDEGFSIRFINKETGESIFVETEKTIFSEYANHITEEISKIKGTIFDTVNGKLVKKVNLDTTHEVNTLNAAFFIQSLIEYNSSKESLSNLSVAMKVQVYAQLFSTGLNTITDAAKVVELVSTALDETIDLLPTLSEGLPIIATIIDGVSLGAAIKELSETSDPLLRQEIEAKIGIMAVNLTTATTAIITSSLGIASGFSILLVPLAGISAGIPSLVNNELVLRDKATKVVDYFKHVSLVETEGVFTLLDDKIMMPQDDLVISEIDFNNNSIVLGKCEIWRMEGGSGHTVTDDIDHFFSAPSITYREPHLSIYDVLEVQKEELDLSKDLMVLPNAPNRVFAWETGWTPGLRSLENDGTKLLDRIRDNYEGEFYWRYFAFIADALITTLKPRYEDTNIRINLDSNTRSFIVPIITTEYIREKLSYSFYGSGGTYALSLSQYNMGINIELSESDVWIIDVDNVVRDVTIESDKIKKGDLIEGILSTLSIEENKIILNSHEINFSGEVNGSNGFVSLTFSILEGINAIIEVDLLSKSYKLLISGELKILMLNSNHIQQKIDYIGFNSELQKNIPYSFVDSEGKENGFINGSTKEGLFVSELPDVVLISKVYMDDSKPSFGYYSNNLKDVKVITKDNVNILTGYYLKDDIKISLSLTLQDEKTIKLNSVHLDESGVAEILKFMNRKGNTNTSDSLMSFLESMNIKSIFVNFLQSNIKFILDANFIISGTTSIGQFEFICDENDNIQPYFIKFNTLETNYTLYVGNRQNMIVEPNYDLDDSGDISSTVINFSQKYLYGIDSCVNKVVISPNIYTDEINITPVYETNNTYPEVIVLDANYINEKINVNINDLSIRYVWSNDGNDFILMSTSEENKVSQVKIRFVNVFKDKTLANKLSFNFSDKQDVPVSEIILSFTPSYYEDGLIGYDLGLVSLYNEKFYINNFGMMVSGLIYINDSLYYFKPPVNNLITGFVTVGDDKYYFNPINGGAASIGETIIDDKNYYFNQSGVLQTGVFSTEDGFKYFAPANTLDENLEGEAIDFTGKLIIDENIYYFDDNYRGAVEWKELDGEMHYFSPETGKAFKGLNQIGDYKYYFNSDGVMQKGFVSINDNKHYFDDSGVMKVGYTEIDGKHFYFAENGEMQIGVFNTEDGFKYFAHHNEDLGNEEGEEISYSGILNFNNKIYYFDDSFTAVVGWKDLEDGSKYYFDEDTAEAYIGLSLINDGQYYFNDDGIMQVGFVTINDKVFYFSDSGIIESGVQNIDDNYFYIDDNGIVQIGVFDTSDGYKYFAPANTVNDNIYGQAVEYSGLVRVGEDVYYFGETYTIETGWIYDMENESDKYYFNPETKKACKGINLIDDIKYYFDEKGIMRTGLISFENNNYYFNENGEMQFGYINIEDKMFYFGEDGVMQIGVFNTPDGFKYFAHQNTLDENFEGESINYTGWLDLDEKRYYFTDEYIAATGSVIIDGEEYYFDPDTAQLVISE

SEQ ID NO: 214 - protein, 2365 aa, Artificial Sequence
  Synthetic amino acid sequence
GSLVNRKQLEKMANVRFRTQEDEYVAILDALEEYHNMSENTVVEKYLKLKDINSLTDIYIDTYKKSGRNKALKKFKEYLVTEVLELKNNNLTPVEKNLHFVIGGQINDTAINYINQWKDVNSDYNVNVFYDSNAFLINTLKKTVVESAINDTLESFRENLNDPRFDYNKFFRKRMEIIYDKQKNFINYYKAQREENPELIIDDIVKTYLSNEYSKEIDELNTYIEESLNKITQNSGNDVRNFEEFKNGESFNLYEQELVERWNLAAASDILRISALKEIGGMYLDVDMLPGIQPDLFESIEKPSSVTVDFWEMTKLEAIMKYKEYIPEYTSEHFDMLDEEVQSSFESVLASKSDKSEIFSSLGDMEASPLEVKIAFNSKGIINQGLISVKDSYCSNLIVKQIENRYKILNNSLNPAISEDNDFNTTTNTFIDSIMAEANADNGRFMMELGKYLRVGFFPDVKTTINLSGPEAYAAAYQDLLMFKEGSMNIHLIEADLRNFEISKTNISQSTEQEMASLWSFDDARAKAQFEEYKRNYFEGSLGEDDNLDFSQNIVVDKEYLLEKISSLARSSERGYIHYIVQLQGDKISYEAACNLFAKTPYDSVLFQKNIEDSEIAYYYNPGDGEIQEIDKYKIPSIISDRPKIKLTFIGHGKDEFNTDIFAGFDVDSLSTEIEAAIDLAKEDISPKSIEINLLGCNMFSYSINVEETYPGKLLLKVKDKISELMPSISQDSIIVSANQYEVRINSEGRRELLDHSGEWINKEESIIKDISSKEYISFNPKENKITVKSKNLPELSTLLQEIRNNSNSSDIELEEKVMLTECEINVISNIDTQIVEERIEEAKNLTSDSINYIKDEFKLIESISDALCDLKQQNELEDSHFISFEDISETDEGFSIRFINKETGESIFVETEKTIFSEYANHITEEISKIKGTIFDTVNGKLVKKVNLDTTHEVNTLNAAFFIQSLIEYNSSKESLSNLSVAMKVQVYAQLFSTGLNTITDAAKVVELVSTALDETIDLLPTLSEGLPIIATIIDGVSLGAAIKELSETSDPLLRQEIEAKIGIMAVNLTTATTAIITSSLGIASGFSILLVPLAGISAGIPSLVNNELVLRDKATKVVDYFKHVSLVETEGVFTLLDDKIMMPQDDLVISEIDFNNNSIVLGKCEIWRMEGGSGHTVTDDIDHFFSAPSITYREPHLSIYDVLEVQKEELDLSKDLMVLPNAPNRVFAWETGWTPGLRSLENDGTKLLDRIRDNYEGEFYWRYFAFIADALITTLKPRYEDTNIRINLDSNTRSFIVPIITTEYIREKLSYSFYGSGGTYALSLSQYNMGINIELSESDVWIIDVDNVVRDVTIESDKIKKGDLIEGILSTLSIEENKIILNSHEINFSGEVNGSNGFVSLTFSILEGINAIIEVDLLSKSYKLLISGELKILMLNSNHIQQKIDYIGFNSELQKNIPYSFVDSEGKENGFINGSTKEGLFVSELPDVVLISKVYMDDSKPSFGYYSNNLKDVKVITKDNVNILTGYYLKDDIKISLSLTLQDEKTIKLNSVHLDESGVAEILKFMNRKGNTNTSDSLMSFLESMNIKSIFVNFLQSNIKFILDANFIISGTTSIGQFEFICDENDNIQPYFIKFNTLETNYTLYVGNRQNMIVEPNYDLDDSGDISSTVINFSQKYLYGIDSCVNKVVISPNIYTDEINITPVYETNNTYPEVIVLDANYINEKINVNINDLSIRYVWSNDGNDFILMSTSEENKVSQVKIRFVNVFKDKTLANKLSFNFSDKQDVPVSEIILSFTPSYYEDGLIGYDLGLVSLYNEKFYINNFGMMVSGLIYINDSLYYFKPPVNNLITGFVTVGDDKYYFNPINGGAASIGETIIDDKNYYFNQSGVLQTGVFSTEDGFKYFAPANTLDENLEGEAIDFTGKLIIDENIYYFDDNYRGAVEWKELDGEMHYFSPETGKAFKGLNQIGDYKYYFNSDGVMQKGFVSINDNKHYFDDSGVMKVGYTEIDGKHFYFAENGEMQIGVFNTEDGFKYFAHHNEDLGNEEGEEISYSGILNFNNKIYYFDDSFTAVVGWKDLEDGSKYYFDEDTAEAYIGLSLINDGQYYFNDDGIMQVGFVTINDKVFYFSDSGIIESGVQNIDDNYFYIDDNGIVQIGVFDTSDGYKYFAPANTVNDNIYGQAVEYSGLVRVGEDVYYFGETYTIETGWIYDMENESDKYYFNPETKKACKGINLIDDIKYYFDEKGIMRTGLISFENNNYYFNENGEMQFGYINIEDKMFYFGEDGVMQIGVFNTPDGFKYFAHQNTLDENFEGESINYTGWLDLDEKRYYFTDEYIAATGSVIIDGEEYYFDPDTAQLVISE

SEQ ID NO: 215 - protein, 2365 aa, Artificial Sequence
  Synthetic amino acid sequence
SLVNRKQLEKMANVRFRTQEDEYVAILDALEEYHNMSENTVVEKYLKLKDINSLTDIYIDTYKKSGRNKALKKFKEYLVTEVLELKNNNLTPVEKNLHFVAIGGQINDTAINYINQWKDVNSDYNVNVFYDSNAFLINTLKKTVVESAINDTLESFRENLNDPRFDYNKFFRKRMEIIYDKQKNFINYYKAQREENPELIIDDIVKTYLSNEYSKEIDELNTYIEESLNKITQNSGNDVRNFEEFKNGESFNLYEQELVERWNLAAASDILRISALKEIGGMYLDVAMLPGIQPDLFESIEKPSSVTVDFWEMTKLEAIMKYKEYIPEYTSEHFDMLDEEVQSSFESVLASKSDKSEIFSSLGDMEASPLEVKIAFNSKGIINQGLISVKDSYCSNLIVKQIENRYKILNNSLNPAISEDNDFNTTTNTFIDSIMAEANADNGRFMMELGKYLRVGFFPDVKTTINLSGPEAYAAAYQDLLMFKEGSMNIHLIEADLRNFEISKTNISQSTEQQMASLWSFDDARAKAQFEEYKRNYFEGSLGEDDNLDFSQNIVVDKEYLLEKISSLARSSERGYIHYIVQLQGDKISYEAACNLFAKTPYDSVLFQKNIEDSEIAYYYNPGDGEIQEIDKYKIPSIISDRPKIKLTFIGHGKDEFNTDIFAGFDVDSLSTEIEAAIDLAKEDISPKSIEINLLGCNMFSYSINVEETYPGKLLLKVKDKISELMPSISQDSIIVSANQYEVRINSEGRRELLDHSGEWINKEESIIKDISSKEYISFNPKENKITVKSKNLPELSTLLQEIRNNSNSSDIELEEKVMLTECEINVISNIDTQIVEERIEEAKNLTSDSINYIKDEFKLIESISDALCDLKQQNELEDSHFISFEDISETDEGFSIRFINKETGESIFVETEKTIFSEYANHITEEISKIKGTIFDTVNGKLVKKVNLDTTHEVNTLNAAFFIQSLIEYNSSKESLSNLSVAMKVQVYAQLFSTGLNTITDAAKVVELVSTALDETIDLLPTLSEGLPIIATIIDGVSLGAAIKELSETSDPLLRQEIEAKIGIMAVNLTTATTAIITSSLGIASGFSILLVPLAGISAGIPSLVNNELVLRDKATKVVDYFKHVSLVETEGVFTLLDDKIMMPQDDLVISEIDFNNNSIVLGKCEIWRMEGGSGHTVTDDIDHFFSAPSITYREPHLSIYDVLEVQKEELDLSKDLMVLPNAPNRVFAWETGWTPGLRSLENDGTKLLDRIRDNYEGEFYWRYFAFIADALITTLKPRYEDTNIRINLDSNTRSFIVPIITTEYIREKLSYSFYGSGGTYALSLSQYNMGINIELSESDVWIIDVDNVVRDVTIESDKIKKGDLIEGILSTLSIEENKIILNSHEINFSGEVNGSNGFVSLTFSILEGINAIIEVDLLSKSYKLLISGELKILMLNSNHIQQKIDYIGFNSELQKNIPYSFVDSEGKENGFINGSTKEGLFVSELPDVVLISKVYMDDSKPSFGYYSNNLKDVKVITKDNVNILTGYYLKDDIKISLSLTLQDEKTIKLNSVHLDESGVAEILKFMNRKGNTNTSDSLMSFLESMNIKSIFVNFLQSNIKFILDANFIISGTTSIGQFEFICDENDNIQPYFIKFNTLETNYTLYVGNRQNMIVEPNYDLDDSGDISSTVINFSQKYLYGIDSCVNKVVISPNIYTDEINITPVYETNNTYPEVIVLDANYINEKINVNINDLSIRYVWSNDGNDFILMSTSEENKVSQVKIRFVNVFKDKTLANKLSFNFSDKQDVPVSEIILSFTPSYYEDGLIGYDLGLVSLYNEKFYINNFGMMVSGLIYINDSLYYFKPPVNNLITGFVTVGDDKYYFNPINGGAASIGETIIDDKNYYFNQSGVLQTGVFSTEDGFKYFAPANTLDENLEGEAIDFTGKLIIDENIYYFDDNYRGAVEWKELDGEMHYFSPETGKAFKGLNQIGDYKYYFNSDGVMQKGFVSINDNKHYFDDSGVMKVGYTEIDGKHFYFAENGEMQIGVFNTEDGFKYFAHHNEDLGNEEGEEISYSGILNFNNKIYYFDDSFTAVVGWKDLEDGSKYYFDEDTAEAYIGLSLINDGQYYFNDDGIMQVGFVTINDKVFYFSDSGIIESGVQNIDDNYFYIDDNGIVQIGVFDTSDGYKYFAPANTVNDNIYGQAVEYSGLVRVGEDVYYFGETYTIETGWIYDMENESDKYYFNPETKKACKGINLIDDIKYYFDEKGIMRTGLISFENNNYYFNENGEMQFGYINIEDKMFYFGEDGVMQIGVFNTPDGFKYFAHQNTLDENFEGESINYTGWLDLDEKRYYFTDEYIAATGSVIIDGEEYYFDPDTAQLVISE

SEQ ID NO: 216 - protein, 2365 aa, Artificial Sequence
  Synthetic amino acid sequence
SLVNRKQLEKMANVRFRTQEDEYVAILDALEEYHNMSENTVVEKYLKLKDINSLTDIYIDTYKKSGRNKALKKFKEYLVTEVLELKNNNLTPVEKNLHFVAIGGQINDTAINYINQWKDVNSDYNVNVFYDSNAFLINTLKKTVVESAINDTLESFRENLNDPRFDYNKFFRKRMEIIYDKQKNFINYYKAQREENPELIIDDIVKTYLSNEYSKEIDELNTYIEESLNKITQNSGNDVRNFEEFKNGESFNLYEQELVERWNLAAASDILRISALKEIGGMYLAVAMLPGIQPDLFESIEKPSSVTVDFWEMTKLEAIMKYKEYIPEYTSEHFDMLDEEVQSSFESVLASKSDKSEIFSSLGDMEASPLEVKIAFNSKGIINQGLISVKDSYCSNLIVKQIENRYKILNNSLNPAISEDNDFNTTTNTFIDSIMAEANADNGRFMMELGKYLRVGFFPDVKTTINLSGPEAYAAAYQDLLMFKEGSMNIHLIEADLRNFEISKTNISQSTEQQMASLWSFDDARAKAQFEEYKRNYFEGSLGEDDNLDFSQNIVVDKEYLLEKISSLARSSERGYIHYIVQLQGDKISYEAACNLFAKTPYDSVLFQKNIEDSEIAYYYNPGDGEIQEIDKYKIPSIISDRPKIKLTFIGHGKDEFNTDIFAGFDVDSLSTEIEAAIDLAKEDISPKSIEINLLGCNMFSYSINVEETYPGKLLLKVKDKISELMPSISQDSIIVSANQYEVRINSEGRRELLDHSGEWINKEESIIKDISSKEYISFNPKENKITVKSKNLPELSTLLQEIRNNSNSSDIELEEKVMLTECEINVISNIDTQIVEERIEEAKNLTSDSINYIKDEFKLIESISDALCDLKQQNELEDSHFISFEDISETDEGFSIRFINKETGESIFVETEKTIFSEYANHITEEISKIKGTIFDTVNGKLVKKVNLDTTHEVNTLNAAFFIQSLIEYNSSKESLSNLSVAMKVQVYAQLFSTGLNTITDAAKVVELVSTALDETIDLLPTLSEGLPIIATIIDGVSLGAAIKELSETSDPLLRQEIEAKIGIMAVNLTTATTAIITSSLGIASGFSILLVPLAGISAGIPSLVNNELVLRDKATKVVDYFKHVSLVETEGVFTLLDDKIMMPQDDLVISEIDFNNNSIVLGKCEIWRMEGGSGHTVTDDIDHFFSAPSITYREPHLSIYDVLEVQKEELDLSKDLMVLPNAPNRVFAWETGWTPGLRSLENDGTKLLDRIRDNYEGEFYWRYFAFIADALITTLKPRYEDTNIRINLDSNTRSFIVPIITTEYIREKLSYSFYGSGGTYALSLSQYNMGINIELSESDVWIIDVDNVVRDVTIESDKIKKGDLIEGILSTLSIEENKIILNSHEINFSGEVNGSNGFVSLTFSILEGINAIIEVDLLSKSYKLLISGELKILMLNSNHIQQKIDYIGFNSELQKNIPYSFVDSEGKENGFINGSTKEGLFVSELPDVVLISKVYMDDSKPSFGYYSNNLKDVKVITKDNVNILTGYYLKDDIKISLSLTLQDEKTIKLNSVHLDESGVAEILKFMNRKGNTNTSDSLMSFLESMNIKSIFVNFLQSNIKFILDANFIISGTTSIGQFEFICDENDNIQPYFIKFNTLETNYTLYVGNRQNMIVEPNYDLDDSGDISSTVINFSQKYLYGIDSCVNKVVISPNIYTDEINITPVYETNNTYPEVIVLDANYINEKINVNINDLSIRYVWSNDGNDFILMSTSEENKVSQVKIRFVNVFKDKTLANKLSFNFSDKQDVPVSEIILSFTPSYYEDGLIGYDLGLVSLYNEKFYINNFGMMVSGLIYINDSLYYFKPPVNNLITGFVTVGDDKYYFNPINGGAASIGETIIDDKNYYFNQSGVLQTGVFSTEDGFKYFAPANTLDENLEGEAIDFTGKLIIDENIYYFDDNYRGAVEWKELDGEMHYFSPETGKAFKGLNQIGDYKYYFNSDGVMQKGFVSINDNKHYFDDSGVMKVGYTEIDGKHFYFAENGEMQIGVFNTEDGFKYFAHHNEDLGNEEGEEISYSGILNFNNKIYYFDDSFTAVVGWKDLEDGSKYYFDEDTAEAYIGLSLINDGQYYFNDDGIMQVGFVTINDKVFYFSDSGIIESGVQNIDDNYFYIDDNGIVQIGVFDTSDGYKYFAPANTVNDNIYGQAVEYSGLVRVGEDVYYFGETYTIETGWIYDMENESDKYYFNPETKKACKGINLIDDIKYYFDEKGIMRTGLISFENNNYYFNENGEMQFGYINIEDKMFYFGEDGVMQIGVFNTPDGFKYFAHQNTLDENFEGESINYTGWLDLDEKRYYFTDEYIAATGSVIIDGEEYYFDPDTAQLVISE

SEQ ID NO: 217 - protein, 2365 aa, Artificial Sequence
  Synthetic amino acid sequence
SLVNRKQLEKMANVRFRTQEDEYVAILDALEEYHNMSENTVVEKYLKLKDINSLTDIYIDTYKKSGRNKALKKFKEYLVTEVLELKNNNLTPVEKNLHFVAIGGQINDTAINYINQWKDVNSDYNVNVFYDSNAFLINTLKKTVVESAINDTLESFRENLNDPRFDYNKFFRKRMEIIYDKQKNFINYYKAQREENPELIIDDIVKTYLSNEYSKEIDELNTYIEESLNKITQNSGNDVRNFEEFKNGESFNLYEQELVERWNLAAASDILRISALKEIGGMYLDVAMLPGIQPDLFESIEKPSSVTVDFWEMTKLEAIMKYKEYIPEYTSEHFDMLDEEVQSSFESVLASKSDKSEIFSSLGDMEASPLEVKIAFNSKGIINQGLISVKDSYCSNLIVKQIENRYKILNNSLNPAISEDNDFNTTTNTFIDSIMAEANADNGRFMMELGKYLRVGFFPDVKTTINLSGPEAYAAAYQDLLMFKEGSMNIHLIEADLRNFEISKTNISQSTEQQMAALWSFDDARAKAQFEEYKRNYFEGSLGEDDNLDFSQNIVVDKEYLLEKISSLARSSERGYIHYIVQLQGDKISYEAACNLFAKTPYDSVLFQKNIEDSEIAYYYNPGDGEIQEIDKYKIPSIISDRPKIKLTFIGHGKDEFNTDIFAGFDVDSLSTEIEAAIDLAKEDISPKSIEINLLGCNMFSYSINVEETYPGKLLLKVKDKISELMPSISQDSIIVSANQYEVRINSEGRRELLDHSGEWINKEESIIKDISSKEYISFNPKENKITVKSKNLPELSTLLQEIRNNSNSSDIELEEKVMLTECEINVISNIDTQIVEERIEEAKNLTSDSINYIKDEFKLIESISDALCDLKQQNELEDSHFISFEDISETDEGFSIRFINKETGESIFVETEKTIFSEYANHITEEISKIKGTIFDTVNGKLVKKVNLDTTHEVNTLNAAFFIQSLIEYNSSKESLSNLSVAMKVQVYAQLFSTGLNTITDAAKVVELVSTALDETIDLLPTLSEGLPIIATIIDGVSLGAAIKELSETSDPLLRQEIEAKIGIMAVNLTTATTAIITSSLGIASGFSILLVPLAGISAGIPSLVNNELVLRDKATKVVDYFKHVSLVETEGVFTLLDDKIMMPQDDLVISEIDFNNNSIVLGKCEIWRMEGGSGHTVTDDIDHFFSAPSITYREPHLSIYDVLEVQKEELDLSKDLMVLPNAPNRVFAWETGWTPGLRSLENDGTKLLDRIRDNYEGEFYWRYFAFIADALITTLKPRYEDTNIRINLDSNTRSFIVPIITTEYIREKLSYSFYGSGGTYALSLSQYNMGINIELSESDVWIIDVDNVVRDVTIESDKIKKGDLIEGILSTLSIEENKIILNSHEINFSGEVNGSNGFVSLTFSILEGINAIIEVDLLSKSYKLLISGELKILMLNSNHIQQKIDYIGFNSELQKNIPYSFVDSEGKENGFINGSTKEGLFVSELPDVVLISKVYMDDSKPSFGYYSNNLKDVKVITKDNVNILTGYYLKDDIKISLSLTLQDEKTIKLNSVHLDESGVAEILKFMNRKGNTNTSDSLMSFLESMNIKSIFVNFLQSNIKFILDANFIISGTTSIGQFEFICDENDNIQPYFIKFNTLETNYTLYVGNRQNMIVEPNYDLDDSGDISSTVINFSQKYLYGIDSCVNKVVISPNIYTDEINITPVYETNNTYPEVIVLDANYINEKINVNINDLSIRYVWSNDGNDFILMSTSEENKVSQVKIRFVNVFKDKTLANKLSFNFSDKQDVPVSEIILSFTPSYYEDGLIGYDLGLVSLYNEKFYINNFGMMVSGLIYINDSLYYFKPPVNNLITGFVTVGDDKYYFNPINGGAASIGETIIDDKNYYFNQSGVLQTGVFSTEDGFKYFAPANTLDENLEGEAIDFTGKLIIDENIYYFDDNYRGAVEWKELDGEMHYFSPETGKAFKGLNQIGDYKYYFNSDGVMQKGFVSINDNKHYFDDSGVMKVGYTEIDGKHFYFAENGEMQIGVFNTEDGFKYFAHHNEDLGNEEGEEISYSGILNFNNKIYYFDDSFTAVVGWKDLEDGSKYYFDEDTAEAYIGLSLINDGQYYFNDDGIMQVGFVTINDKVFYFSDSGIIESGVQNIDDNYFYIDDNGIVQIGVFDTSDGYKYFAPANTVNDNIYGQAVEYSGLVRVGEDVYYFGETYTIETGWIYDMENESDKYYFNPETKKACKGINLIDDIKYYFDEKGIMRTGLISFENNNYYFNENGEMQFGYINIEDKMFYFGEDGVMQIGVFNTPDGFKYFAHQNTLDENFEGESINYTGWLDLDEKRYYFTDEYIAATGSVIIDGEEYYFDPDTAQLVISE

SEQ ID NO: 218 - protein, 2365 aa, Artificial Sequence
  Synthetic amino acid sequence
SLVNRKQLEKMANVRFRTQEDEYVAILDALEEYHNMSENTVVEKYLKLKDINSLTDIYIDTYKKSGRNKALKKFKEYLVTEVLELKNNNLTPVEKNLHFVAIGGQINDTAINYINQWKDVNSDYNVNVFYDSNAFLINTLKKTVVESAINDTLESFRENLNDPRFDYNKFFRKRMEIIYDKQKNFINYYKAQREENPELIIDDIVKTYLSNEYSKEIDELNTYIEESLNKITQNSGNDVRNFEEFKNGESFNLYEQELVERWNLAAASDILRISALKEIGGMYLDVAMLPGIQPDLFESIEKPSSVTVDFWEMTKLEAIMKYKEYIPEYTSEHFDMLDEEVQSSFESVLASKSDKSEIFSSLGDMEASPLEVKIAFNSKGIINQGLISVKDSYCSNLIVKQIENRYKILNNSLNPAISEDNDFNTTTNTFIDSIMAEANADNGRFMMELGKYLRVGFFPDVKTTINLSGPEAYAAAYQDLLMFKEGSMNIHLIEADLRNFEISKTNISQSTEQQMASLASFDDARAKAQFEEYKRNYFEGSLGEDDNLDFSQNIVVDKEYLLEKISSLARSSERGYIHYIVQLQGDKISYEAACNLFAKTPYDSVLFQKNIEDSEIAYYYNPGDGEIQEIDKYKIPSIISDRPKIKLTFIGHGKDEFNTDIFAGFDVDSLSTEIEAAIDLAKEDISPKSIEINLLGCNMFSYSINVEETYPGKLLLKVKDKISELMPSISQDSIIVSANQYEVRINSEGRRELLDHSGEWINKEESIIKDISSKEYISFNPKENKITVKSKNLPELSTLLQEIRNNSNSSDIELEEKVMLTECEINVISNIDTQIVEERIEEAKNLTSDSINYIKDEFKLIESISDALCDLKQQNELEDSHFISFEDISETDEGFSIRFINKETGESIFVETEKTIFSEYANHITEEISKIKGTIFDTVNGKLVKKVNLDTTHEVNTLNAAFFIQSLIEYNSSKESLSNLSVAMKVQVYAQLFSTGLNTITDAAKVVELVSTALDETIDLLPTLSEGLPIIATIIDGVSLGAAIKELSETSDPLLRQEIEAKIGIMAVNLTTATTAIITSSLGIASGFSILLVPLAGISAGIPSLVNNELVLRDKATKVVDYFKHVSLVETEGVFTLLDDKIMMPQDDLVISEIDFNNNSIVLGKCEIWRMEGGSGHTVTDDIDHFFSAPSITYREPHLSIYDVLEVQKEELDLSKDLMVLPNAPNRVFAWETGWTPGLRSLENDGTKLLDRIRDNYEGEFYWRYFAFIADALITTLKPRYEDTNIRINLDSNTRSFIVPIITTEYIREKLSYSFYGSGGTYALSLSQYNMGINIELSESDVWIIDVDNVVRDVTIESDKIKKGDLIEGILSTLSIEENKIILNSHEINFSGEVNGSNGFVSLTFSILEGINAIIEVDLLSKSYKLLISGELKILMLNSNHIQQKIDYIGFNSELQKNIPYSFVDSEGKENGFINGSTKEGLFVSELPDVVLISKVYMDDSKPSFGYYSNNLKDVKVITKDNVNILTGYYLKDDIKISLSLTLQDEKTIKLNSVHLDESGVAEILKFMNRKGNTNTSDSLMSFLESMNIKSIFVNFLQSNIKFILDANFIISGTTSIGQFEFICDENDNIQPYFIKFNTLETNYTLYVGNRQNMIVEPNYDLDDSGDISSTVINFSQKYLYGIDSCVNKVVISPNIYTDEINITPVYETNNTYPEVIVLDANYINEKINVNINDLSIRYVWSNDGNDFILMSTSEENKVSQVKIRFVNVFKDKTLANKLSFNFSDKQDVPVSEIILSFTPSYYEDGLIGYDLGLVSLYNEKFYINNFGMMVSGLIYINDSLYYFKPPVNNLITGFVTVGDDKYYFNPINGGAASIGETIIDDKNYYFNQSGVLQTGVFSTEDGFKYFAPANTLDENLEGEAIDFTGKLIIDENIYYFDDNYRGAVEWKELDGEMHYFSPETGKAFKGLNQIGDYKYYFNSDGVMQKGFVSINDNKHYFDDSGVMKVGYTEIDGKHFYFAENGEMQIGVFNTEDGFKYFAHHNEDLGNEEGEEISYSGILNFNNKIYYFDDSFTAVVGWKDLEDGSKYYFDEDTAEAYIGLSLINDGQYYFNDDGIMQVGFVTINDKVFYFSDSGIIESGVQNIDDNYFYIDDNGIVQIGVFDTSDGYKYFAPANTVNDNIYGQAVEYSGLVRVGEDVYYFGETYTIETGWIYDMENESDKYYFNPETKKACKGINLIDDIKYYFDEKGIMRTGLISFENNNYYFNENGEMQFGYINIEDKMFYFGEDGVMQIGVFNTPDGFKYFAHQNTLDENFEGESINYTGWLDLDEKRYYFTDEYIAATGSVIIDGEEYYFDPDTAQLVISE

SEQ ID NO: 219 - protein, 2365 aa, Artificial Sequence
  Synthetic amino acid sequence
SLVNRKQLEKMANVRFRVQEDEYVAILDALEEYHNMSENTVVEKYLKLKDINSLTDIYIDTYKKSGRNKALKKFKEYLVTEVLELKNNNLTPVEKNLHFVAIGGQINDTAINYINQWKDVNSDYNVNVFYDSNAFLINTLKKTIVESATNDTLESFRENLNDPRFDYNKFYRKRMEIIYDKQKNFINYYKTQREENPDLIIDDIVKIYLSNEYSKDIDELNSYIEESLNKVTENSGNDVRNFEEFKGGESFKLYEQELVERWNLAAASDILRISALKEVGGVYLDVAMLPGIQPDLFESIEKPSSVTVDFWEMVKLEAIMKYKEYIPGYTSEHFDMLDEEVQSSFESVLASKSDKSEIFSSLGDMEASPLEVKIAFNSKGIINQGLISVKDSYCSNLIVKQIENRYKILNNSLNPAISEDNDFNTTTNAFIDSIMAEANADNGRFMMELGKYLRVGFFPDVKTTINLSGPEAYAAAYQDLLMFKEGSMNIHLIEADLRNFEISKTNISQSTEQQMASLWSFDDARAKAQFEEYKKNYFEGSLGEDDNLDFSQNTVVDKEYLLEKISSLARSSERGYIHYIVQLQGDKISYEAACNLFAKTPYDSVLFQKNIEDSEIAYYYNPGDGEIQEIDKYKIPSIISDRPKIKLTFIGHGKDEFNTDIFAGLDVDSLSTEIETAIDLAKEDISPKSIEINLLGCNMFSYSVNVEETYPGKLLLRVKDKVSELMPSISQDSIIVSANQYEVRINSEGRRELLDHSGEWINKEESIIKDISSKEYISFNPKENKIIVKSKNLPELSTLLQEIRNNSNSSDIELEEKVMLAECEINVISNIDTQVVEGRIEEAKSLTSDSINYIKNEFKLIESISDALYDLKQQNELEESHFISFEDILETDEGFSIRFIDKETGESIFVETEKAIFSEYANHITEEISKIKGTIFDTVNGKLVKKVNLDATHEVNTLNAAFFIQSLIEYNSSKESLSNLSVAMKVQVYAQLFSTGLNTITDAAKVVELVSTALDETIDLLPTLSEGLPVIATIIDGVSLGAAIKELSETSDPLLRQEIEAKIGIMAVNLTAATTAIITSSLGIASGFSILLVPLAGISAGIPSLVNNELILRDKATKVVDYFSHISLAESEGAFTSLDDKIMMPQDDLVISEIDFNNNSITLGKCEIWRMEGGSGHTVTDDIDHFFSAPSITYREPHLSIYDVLEVQKEELDLSKDLMVLPNAPNRVFAWETGWTPGLRSLENDGTKLLDRIRDNYEGEFYWRYFAFIADALITTLKPRYEDTNIRINLDSNTRSFIVPVITTEYIREKLSYSFYGSGGTYALSLSQYNMNINIELNENDTWVIDVDNVVRDVTIESDKIKKGDLIENILSKLSIEDNKIILDNHEINFSGTLNGGNGFVSLTFSILEGINAVIEVDLLSKSYKVLISGELKTLMANSNSVQQKIDYIGLNSELQKNIPYSFMDDKGKENGFINCSTKEGLFVSELSDVVLISKVYMDNSKPLFGYCSNDLKDVKVITKDDVIILTGYYLKDDIKISLSFTIQDENTIKLNGVYLDENGVAEILKFMNKKGSTNTSDSLMSFLESMNIKSIFINSLQSNTKLILDTNFIISGTTSIGQFEFICDKDNNIQPYFIKFNTLETKYTLYVGNRQNMIVEPNYDLDDSGDISSTVINFSQKYLYGIDSCVNKVIISPNIYTDEINITPIYEANNTYPEVIVLDTNYISEKINININDLSIRYVWSNDGSDFILMSTDEENKVSQVKIRFTNVFKGNTISDKISFNFSDKQDVSINKVISTFTPSYYVEGLLNYDLGLISLYNEKFYINNFGMMVSGLVYINDSLYYFKPPIKNLITGFTTIGDDKYYFNPDNGGAASVGETIIDGKNYYFSQNGVLQTGVFSTEDGFKYFAPADTLDENLEGEAIDFTGKLTIDENVYYFGDNYRAAIEWQTLDDEVYYFSTDTGRAFKGLNQIGDDKFYFNSDGIMQKGFVNINDKTFYFDDSGVMKSGYTEIDGKYFYFAENGEMQIGVFNTADGFKYFAHHDEDLGNEEGEALSYSGILNFNNKIYYFDDSFTAVVGWKDLEDGSKYYFDEDTAEAYIGISIINDGKYYFNDSGIMQIGFVTINNEVFYFSDSGIVESGMQNIDDNYFYIDENGLVQIGVFDTSDGYKYFAPANTVNDNIYGQAVEYSGLVRVGEDVYYFGETYTIETGWIYDMENESDKYYFDPETKKAYKGINVIDDIKYYFDENGIMRTGLITFEDNHYYFNEDGIMQYGYLNIEDKTFYFSEDGIMQIGVFNTPDGFKYFAHQNTLDENFEGESINYTGWLDLDEKRYYFTDEYIAATGSVIIDGEEYYFDPDTAQLVISE

SEQ ID NO: 220 - protein, 2365 aa, Artificial Sequence
  Synthetic amino acid sequence
SLVNRKQLEKMANVRFRVQEDEYVAILDALEEYHNMSENTVVEKYLKLKDINSLTDIYIDTYKKSGRNKALKKFKEYLVTEVLELKNNNLTPVEKNLHFVAIGGQINDTAINYINQWKDVNSDYNVNVFYDSNAFLINTLKKTIVESATNDTLESFRENLNDPRFDYNKFYRKRMEIIYDKQKNFINYYKTQREENPDLIIDDIVKIYLSNEYSKDIDELNSYIEESLNKVTENSGNDVRNFEEFKGGESFKLYEQELVERWNLAAASDILRISALKEVGGVYLDVAMLPGIQPDLFESIEKPSSVTVDFWEMVKLEAIMKYKEYIPGYTSEHFDMLDEEVQSSFESVLASKSDKSEIFSSLGDMEASPLEVKIAFNSKGIINQGLISVKDSYCSNLIVKQIENRYKILNNSLNPAISEDNDFNTTTNAFIDSIMAEANADNGRFMMELGKYLRVGFFPDVKTTINLSGPEAYAAAYQDLLMFKEGSMNIHLIEADLRNFEISKTNISQSTEQQMASLASFDDARAKAQFEEYKKNYFEGSLGEDDNLDFSQNTVVDKEYLLEKISSLARSSERGYIHYIVQLQGDKISYEAACNLFAKTPYDSVLFQKNIEDSEIAYYYNPGDGEIQEIDKYKIPSIISDRPKIKLTFIGHGKDEFNTDIFAGLDVDSLSTEIETAIDLAKEDISPKSIEINLLGANMFSYSVNVEETYPGKLLLRVKDKVSELMPSISQDSIIVSANQYEVRINSEGRRELLDHSGEWINKEESIIKDISSKEYISFNPKENKIIVKSKNLPELSTLLQEIRNNSNSSDIELEEKVMLAECEINVISNIDTQVVEGRIEEAKSLTSDSINYIKNEFKLIESISDALYDLKQQNELEESHFISFEDILETDEGFSIRFIDKETGESIFVETEKAIFSEYANHITEEISKIKGTIFDTVNGKLVKKVNLDATHEVNTLNAAFFIQSLIEYNSSKESLSNLSVAMKVQVYAQLFSTGLNTITDAAKVVELVSTALDETIDLLPTLSEGLPVIATIIDGVSLGAAIKELSETSDPLLRQEIEAKIGIMAVNLTAATTAIITSSLGIASGFSILLVPLAGISAGIPSLVNNELILRDKATKVVDYFSHISLAESEGAFTSLDDKIMMPQDDLVISEIDFNNNSITLGKCEIWRMEGGSGHTVTDDIDHFFSAPSITYREPHLSIYDVLEVQKEELDLSKDLMVLPNAPNRVFAWETGWTPGLRSLENDGTKLLDRIRDNYEGEFYWRYFAFIADALITTLKPRYEDTNIRINLDSNTRSFIVPVITTEYIREKLSYSFYGSGGTYALSLSQYNMNINIELNENDTWVIDVDNVVRDVTIESDKIKKGDLIENILSKLSIEDNKIILDNHEINFSGTLNGGNGFVSLTFSILEGINAVIEVDLLSKSYKVLISGELKTLMANSNSVQQKIDYIGLNSELQKNIPYSFMDDKGKENGFINCSTKEGLFVSELSDVVLISKVYMDNSKPLFGYCSNDLKDVKVITKDDVIILTGYYLKDDIKISLSFTIQDENTIKLNGVYLDENGVAEILKFMNKKGSTNTSDSLMSFLESMNIKSIFINSLQSNTKLILDTNFIISGTTSIGQFEFICDKDNNIQPYFIKFNTLETKYTLYVGNRQNMIVEPNYDLDDSGDISSTVINFSQKYLYGIDSCVNKVIISPNIYTDEINITPIYEANNTYPEVIVLDTNYISEKINININDLSIRYVWSNDGSDFILMSTDEENKVSQVKIRFTNVFKGNTISDKISFNFSDKQDVSINKVISTFTPSYYVEGLLNYDLGLISLYNEKFYINNFGMMVSGLVYINDSLYYFKPPIKNLITGFTTIGDDKYYFNPDNGGAASVGETIIDGKNYYFSQNGVLQTGVFSTEDGFKYFAPADTLDENLEGEAIDFTGKLTIDENVYYFGDNYRAAIEWQTLDDEVYYFSTDTGRAFKGLNQIGDDKFYFNSDGIMQKGFVNINDKTFYFDDSGVMKSGYTEIDGKYFYFAENGEMQIGVFNTADGFKYFAHHDEDLGNEEGEALSYSGILNFNNKIYYFDDSFTAVVGWKDLEDGSKYYFDEDTAEAYIGISIINDGKYYFNDSGIMQIGFVTINNEVFYFSDSGIVESGMQNIDDNYFYIDENGLVQIGVFDTSDGYKYFAPANTVNDNIYGQAVEYSGLVRVGEDVYYFGETYTIETGWIYDMENESDKYYFDPETKKAYKGINVIDDIKYYFDENGIMRTGLITFEDNHYYFNEDGIMQYGYLNIEDKTFYFSEDGIMQIGVFNTPDGFKYFAHQNTLDENFEGESINYTGWLDLDEKRYYFTDEYIAATGSVIIDGEEYYFDPDTAQLVISE

SEQ ID NO: 221 - protein, 2365 aa, Artificial Sequence
  Synthetic amino acid sequence
SLVNRKQLEKMANVRFRTQEDEYVAILDALEEYHNMSENTVVEKYLKLKDINSLTDIYIDTYKKSGRNKALKKFKEYLVTEVLELKNNNLTPVEKNLHFVAIGGQINDTAINYINQWKDVNSDYNVNVFYDSNAFLINTLKKTVVESAINDTLESFRENLNDPRFDYNKFFRKRMEIIYDKQKNFINYYKAQREENPELIIDDIVKTYLSNEYSKEIDELNTYIEESLNKITQNSGNDVRNFEEFKNGESFNLYEQELVERWNLAAASDILRISALKEIGGMYLDVAMLPGIQPDLFESIEKPSSVTVDFWEMTKLEAIMKYKEYIPEYTSEHFDMLDEEVQSSFESVLASKSDKSEIFSSLGDMEASPLEVKIAFNSKGIINQGLISVKDSYCSNLIVKQIENRYKILNNSLNPAISEDNDFNTTTNTFIDSIMAEANADNGRFMMELGKYLRVGFFPDVKTTINLSGPEAYAAAYQDLLMFKEGSMNIHLIEADLRNFEISKTNISQSTEQQMASLASFDDARAKAQFEEYKRNYFEGSLGEDDNLDFSQNIVVDKEYLLEKISSLARSSERGYIHYIVQLQGDKISYEAACNLFAKTPYDSVLFQKNIEDSEIAYYYNPGDGEIQEIDKYKIPSIISDRPKIKLTFIGHGKDEFNTDIFAGFDVDSLSTEIEAAIDLAKEDISPKSIEINLLGANMFSYSINVEETYPGKLLLKVKDKISELMPSISQDSIIVSANQYEVRINSEGRRELLDHSGEWINKEESIIKDISSKEYISFNPKENKITVKSKNLPELSTLLQEIRNNSNSSDIELEEKVMLTECEINVISNIDTQIVEERIEEAKNLTSDSINYIKDEFKLIESISDALCDLKQQNELEDSHFISFEDISETDEGFSIRFINKETGESIFVETEKTIFSEYANHITEEISKIKGTIFDTVNGKLVKKVNLDTTHEVNTLNAAFFIQSLIEYNSSKESLSNLSVAMKVQVYAQLFSTGLNTITDAAKVVELVSTALDETIDLLPTLSEGLPIIATIIDGVSLGAAIKELSETSDPLLRQEIEAKIGIMAVNLTTATTAIITSSLGIASGFSILLVPLAGISAGIPSLVNNELVLRDKATKVVDYFKHVSLVETEGVFTLLDDKIMMPQDDLVISEIDFNNNSIVLGKCEIWRMEGGSGHTVTDDIDHFFSAPSITYREPHLSIYDVLEVQKEELDLSKDLMVLPNAPNRVFAWETGWTPGLRSLENDGTKLLDRIRDNYEGEFYWRYFAFIADALITTLKPRYEDTNIRINLDSNTRSFIVPIITTEYIREKLSYSFYGSGGTYALSLSQYNMGINIELSESDVWIIDVDNVVRDVTIESDKIKKGDLIEGILSTLSIEENKIILNSHEINFSGEVNGSNGFVSLTFSILEGINAIIEVDLLSKSYKLLISGELKILMLNSNHIQQKIDYIGFNSELQKNIPYSFVDSEGKENGFINGSTKEGLFVSELPDVVLISKVYMDDSKPSFGYYSNNLKDVKVITKDNVNILTGYYLKDDIKISLSLTLQDEKTIKLNSVHLDESGVAEILKFMNRKGNTNTSDSLMSFLESMNIKSIFVNFLQSNIKFILDANFIISGTTSIGQFEFICDENDNIQPYFIKFNTLETNYTLYVGNRQNMIVEPNYDLDDSGDISSTVINFSQKYLYGIDSCVNKVVISPNIYTDEINITPVYETNNTYPEVIVLDANYINEKINVNINDLSIRYVWSNDGNDFILMSTSEENKVSQVKIRFVNVFKDKTLANKLSFNFSDKQDVPVSEIILSFTPSYYEDGLIGYDLGLVSLYNEKFYINNFGMMVSGLIYINDSLYYFKPPVNNLITGFVTVGDDKYYFNPINGGAASIGETIIDDKNYYFNQSGVLQTGVFSTEDGFKYFAPANTLDENLEGEAIDFTGKLIIDENIYYFDDNYRGAVEWKELDGEMHYFSPETGKAFKGLNQIGDYKYYFNSDGVMQKGFVSINDNKHYFDDSGVMKVGYTEIDGKHFYFAENGEMQIGVFNTEDGFKYFAHHNEDLGNEEGEEISYSGILNFNNKIYYFDDSFTAVVGWKDLEDGSKYYFDEDTAEAYIGLSLINDGQYYFNDDGIMQVGFVTINDKVFYFSDSGIIESGVQNIDDNYFYIDDNGIVQIGVFDTSDGYKYFAPANTVNDNIYGQAVEYSGLVRVGEDVYYFGETYTIETGWIYDMENESDKYYFNPETKKACKGINLIDDIKYYFDEKGIMRTGLISFENNNYYFNENGEMQFGYINIEDKMFYFGEDGVMQIGVFNTPDGFKYFAHQNTLDENFEGESINYTGWLDLDEKRYYFTDEYIAATGSVIIDGEEYYFDPDTAQLVISE

SEQ ID NO: 222 - protein, 2365 aa, Artificial Sequence
  Synthetic amino acid sequence
  VARIANT (101)..(101): Xaa is any amino acid, but not Trp
  VARIANT (287)..(287): Xaa is any amino acid, but not Asp
  VARIANT (514)..(514): Xaa is any amino acid, but not Glu
  VARIANT (519)..(519): Xaa is any amino acid, but not Trp
  VARIANT (697)..(697): Xaa is any amino acid, but not Cys
SLVNRKQLEKMANVRFRVQEDEYVAILDALEEYHNMSENTVVEKYLKLKDINSLTDIYIDTYKKSGRNKALKKFKEYLVTEVLELKNNNLTPVEKNLHFVXIGGQINDTAINYINQWKDVNSDYNVNVFYDSNAFLINTLKKTIVESATNDTLESFRENLNDPRFDYNKFYRKRMEIIYDKQKNFINYYKTQREENPDLIIDDIVKIYLSNEYSKDIDELNSYIEESLNKVTENSGNDVRNFEEFKGGESFKLYEQELVERWNLAAASDILRISALKEVGGVYLDVXMLPGIQPDLFESIEKPSSVTVDFWEMVKLEAIMKYKEYIPGYTSEHFDMLDEEVQSSFESVLASKSDKSEIFSSLGDMEASPLEVKIAFNSKGIINQGLISVKDSYCSNLIVKQIENRYKILNNSLNPAISEDNDFNTTTNAFIDSIMAEANADNGRFMMELGKYLRVGFFPDVKTTINLSGPEAYAAAYQDLLMFKEGSMNIHLIEADLRNFEISKTNISQSTEQXMASLXSFDDARAKAQFEEYKKNYFEGSLGEDDNLDFSQNTVVDKEYLLEKISSLARSSERGYIHYIVQLQGDKISYEAACNLFAKTPYDSVLFQKNIEDSEIAYYYNPGDGEIQEIDKYKIPSIISDRPKIKLTFIGHGKDEFNTDIFAGLDVDSLSTEIETAIDLAKEDISPKSIEINLLGXNMFSYSVNVEETYPGKLLLRVKDKVSELMPSISQDSIIVSANQYEVRINSEGRRELLDHSGEWINKEESIIKDISSKEYISFNPKENKIIVKSKNLPELSTLLQEIRNNSNSSDIELEEKVMLAECEINVISNIDTQVVEGRIEEAKSLTSDSINYIKNEFKLIESISDALYDLKQQNELEESHFISFEDILETDEGFSIRFIDKETGESIFVETEKAIFSEYANHITEEISKIKGTIFDTVNGKLVKKVNLDATHEVNTLNAAFFIQSLIEYNSSKESLSNLSVAMKVQVYAQLFSTGLNTITDAAKVVELVSTALDETIDLLPTLSEGLPVIATIIDGVSLGAAIKELSETSDPLLRQEIEAKIGIMAVNLTAATTAIITSSLGIASGFSILLVPLAGISAGIPSLVNNELILRDKATKVVDYFSHISLAESEGAFTSLDDKIMMPQDDLVISEIDFNNNSITLGKCEIWRMEGGSGHTVTDDIDHFFSAPSITYREPHLSIYDVLEVQKEELDLSKDLMVLPNAPNRVFAWETGWTPGLRSLENDGTKLLDRIRDNYEGEFYWRYFAFIADALITTLKPRYEDTNIRINLDSNTRSFIVPVITTEYIREKLSYSFYGSGGTYALSLSQYNMNINIELNENDTWVIDVDNVVRDVTIESDKIKKGDLIENILSKLSIEDNKIILDNHEINFSGTLNGGNGFVSLTFSILEGINAVIEVDLLSKSYKVLISGELKTLMANSNSVQQKIDYIGLNSELQKNIPYSFMDDKGKENGFINCSTKEGLFVSELSDVVLISKVYMDNSKPLFGYCSNDLKDVKVITKDDVIILTGYYLKDDIKISLSFTIQDENTIKLNGVYLDENGVAEILKFMNKKGSTNTSDSLMSFLESMNIKSIFINSLQSNTKLILDTNFIISGTTSIGQFEFICDKDNNIQPYFIKFNTLETKYTLYVGNRQNMIVEPNYDLDDSGDISSTVINFSQKYLYGIDSCVNKVIISPNIYTDEINITPIYEANNTYPEVIVLDTNYISEKINININDLSIRYVWSNDGSDFILMSTDEENKVSQVKIRFTNVFKGNTISDKISFNFSDKQDVSINKVISTFTPSYYVEGLLNYDLGLISLYNEKFYINNFGMMVSGLVYINDSLYYFKPPIKNLITGFTTIGDDKYYFNPDNGGAASVGETIIDGKNYYFSQNGVLQTGVFSTEDGFKYFAPADTLDENLEGEAIDFTGKLTIDENVYYFGDNYRAAIEWQTLDDEVYYFSTDTGRAFKGLNQIGDDKFYFNSDGIMQKGFVNINDKTFYFDDSGVMKSGYTEIDGKYFYFAENGEMQIGVFNTADGFKYFAHHDEDLGNEEGEALSYSGILNFNNKIYYFDDSFTAVVGWKDLEDGSKYYFDEDTAEAYIGISIINDGKYYFNDSGIMQIGFVTINNEVFYFSDSGIVESGMQNIDDNYFYIDENGLVQIGVFDTSDGYKYFAPANTVNDNIYGQAVEYSGLVRVGEDVYYFGETYTIETGWIYDMENESDKYYFDPETKKAYKGINVIDDIKYYFDENGIMRTGLITFEDNHYYFNEDGIMQYGYLNIEDKTFYFSEDGIMQIGVFNTPDGFKYFAHQNTLDENFEGESINYTGWLDLDEKRYYFTDEYIAATGSVIIDGEEYYFDPDTAQLVISE

SEQ ID NO: 223 - protein, 769 aa, Clostridium difficile
MSLISKEELIKLAYSIRPRENEYKTILTNLDEYNKLTTNNNENKYLQLKKLNESIDVFMNKYKTSSRNRALSNLKKDILKEVILIKNSNTSPVEKNLHFVWIGGEVSDIALEYIKQWADINAEYNIKLWYDSEAFLVNTLKKAIVESSTTEALQLLEEEIQNPQFDNMKFYKKRMEFIYDRQKRFINYYKSQINKPTVPTIDDIIKSHLVSEYNRDETVLESYRTNSLRKINSNHGIDIRANSLFTEQELLNIYSQELLNRGNLAAASDIVRLLALKNFGGVYLDVDMLPGIHSDLFKTISRPSSIGLDRWEMIKLEAIMKYKKYINNYTSENFDKLDQQLKDNFKLIIESKSEKSEIFSKLENLNVSDLEIKIAFALGSVINQALISKQGSYLTNLVIEQVKNRYQFLNQHLNPAIESDNNFTDTTKIFHDSLFNSATAENSMFLTKIAPYLQVGFMPEARSTISLSGPGAYASAYYDFINLQENTIEKTLKASDLIEFKFPENNLSQLTEQEINSLWSFDQASAKYQFEKYVRDYTGGSLSEDNGVDFNKNTALDKNYLLNNKIPSNNVEEAGSKNYVHYIIQLQGDDISYEATCNLFSKNPKNSIIIQRNMNESAKSYFLSDDGESILELNKYRIPERLKNKEKVKVTFIGHGKDEFNTSEFARLSVDSLSNEISSFLDTIKLDISPKNVEVNLLGCNMFSYDFNVEETYPGKLLLSIMDKITSTLPDVNKNSITIGANQYEVRINSEGRKELLAHSGKWINKEEA

SEQ ID NO: 224 - protein, 541 aa, Clostridium difficile
MSLISKEELIKLAYSIRPRENEYKTILTNLDEYNKLTTNNNENKYLQLKKLNESIDVFMNKYKTSSRNRALSNLKKDILKEVILIKNSNTSPVEKNLHFVWIGGEVSDIALEYIKQWADINAEYNIKLWYDSEAFLVNTLKKAIVESSTTEALQLLEEEIQNPQFDNMKFYKKRMEFIYDRQKRFINYYKSQINKPTVPTIDDIIKSHLVSEYNRDETVLESYRTNSLRKINSNHGIDIRANSLFTEQELLNIYSQELLNRGNLAAASDIVRLLALKNFGGVYLDVDMLPGIHSDLFKTISRPSSIGLDRWEMIKLEAIMKYKKYINNYTSENFDKLDQQLKDNFKLIIESKSEKSEIFSKLENLNVSDLEIKIAFALGSVINQALISKQGSYLTNLVIEQVKNRYQFLNQHLNPAIESDNNFTDTTKIFHDSLFNSATAENSMFLTKIAPYLQVGFMPEARSTISLSGPGAYASAYYDFINLQENTIEKTLKASDLIEFKFPENNLSQLTEQEINSLWSFDQASAKYQFEKYVRDYTGGS

SEQ ID NO: 225 - protein, 228 aa, Clostridium difficile
LSEDNGVDFNKNTALDKNYLLNNKIPSNNVEEAGSKNYVHYIIQLQGDDISYEATCNLFSKNPKNSIIIQRNMNESAKSYFLSDDGESILELNKYRIPERLKNKEKVKVTFIGHGKDEFNTSEFARLSVDSLSNEISSFLDTIKLDISPKNVEVNLLGCNMFSYDFNVEETYPGKLLLSIMDKITSTLPDVNKNSITIGANQYEVRINSEGRKELLAHSGKWINKEEA

SEQ ID NO: 226 - protein, 1039 aa, Clostridium difficile
IMSDLSSKEYIFFDSIDNKLKAKSKNIPGLASISEDIKTLLLDASVSPDTKFILNNLKLNIESSIGDYIYYEKLEPVKNIIHNSIDDLIDEFNLLENVSDELYELKKLNNLDEKYLISFEDISKNNSTYSVRFINKSNGESVYVETEKEIFSKYSEHITKEISTIKNSIITDVNGNLLDNIQLDHTSQVNTLNAAFFIQSLIDYSSNKDVLNDLSTSVKVQLYAQLFSTGLNTIYDSIQLVNLISNAVNDTINVLPTITEGIPIVSTILDGINLGAAIKELLDEHDPLLKKELEAKVGVLAINMSLSIAATVASIVGIGAEVTIFLLPIAGISAGIPSLVNNELILHDKATSVVNYFNHLSESKKYGPLKTEDDKILVPIDDLVISEIDFNNNSIKLGTCNILAMEGGSGHTVTGNIDHFFSSPSISSHIPSLSIYSAIGIETENLDFSKKIMMLPNAPSRVFWWETGAVPGLRSLENDGTRLLDSIRDLYPGKFYWRFYAFFDYAITTLKPVYEDTNIKIKLDKDTRNFIMPTITTNEIRNKLSYSFDGAGGTYSLLLSSYPISTNINLSKDDLWIFNIDNEVREISIENGTIKKGKLIKDVLSKIDINKNKLIIGNQTIDFSGDIDNKDRYIFLTCELDDKISLIIEINLVAKSYSLLLSGDKNYLISNLSNIIEKINTLGLDSKNIAYNYTDESNNKYFGAISKTSQKSIIHYKKDSKNILEFYNDSTLEFNSKDFIAEDINVFMKDDINTITGKYYVDNNTDKSIDFSISLVSKNQVKVNGLYLNESVYSSYLDFVKNSDGHHNTSNFMNLFLDNISFWKLFGFENINFVIDKYFTLVGKTNLGYVEFICDNNKNIDIYFGEWKTSSSKSTIFSGNGRNVVVEPIYNPDTGEDISTSLDFSYEPLYGIDRYINKVLIAPDLYTSLININTNYYSNEYYPEIIVLNPNTFHKKVNINLDSSSFEYKWSTEGSDFILVRYLEESNKKILQKIRIKGILSNTQSFNKMSIDFKDIKKLSLGYIMSNFKSFNSENELDR

SEQ ID NO: 227 - protein, 266 aa, Clostridium difficile
AEDINVFMKDDINTITGKYYVDNNTDKSIDFSISLVSKNQVKVNGLYLNESVYSSYLDFVKNSDGHHNTSNFMNLFLDNISFWKLFGFENINFVIDKYFTLVGKTNLGYVEFICDNNKNIDIYFGEWKTSSSKSTIFSGNGRNVVVEPIYNPDTGEDISTSLDFSYEPLYGIDRYINKVLIAPDLYTSLININTNYYSNEYYPEIIVLNPNTFHKKVNINLDSSSFEYKWSTEGSDFILVRYLEESNKKILQKIRIKGILSNTQSF

SEQ ID NO: 228 - protein, 902 aa, Clostridium difficile
DHLGFKIIDNKTYYYDEDSKLVKGLININNSLFYFDPIEFNLVTGWQTINGKKYYFDINTGAALISYKIINGKHFYFNNDGVMQLGVFKGPDGFEYFAPANTQNNNIEGQAIVYQSKFLTLNGKKYYFDNDSKAVTGWRIINNEKYYFNPNNAIAAVGLQVIDNNKYYFNPDTAIISKGWQTVNGSRYYFDTDTAIAFNGYKTIDGKHFYFDSDCVVKIGVFSTSNGFEYFAPANTYNNNIEGQAIVYQSKFLTLNGKKYYFDNNSKAVTGWQTIDSKKYYFNTNTAEAATGWQTIDGKKYYFNTNTAEAATGWQTIDGKKYYFNTNTAIASTGYTIINGKHFYFNTDGIMQIGVFKGPNGFEYFAPANTDANNIEGQAILYQNEFLTLNGKKYYFGSDSKAVTGWRIINNKKYYFNPNNAIAAIHLCTINNDKYYFSYDGILQNGYITIERNNFYFDANNESKMVTGVFKGPNGFEYFAPANTHNNNIEGQAIVYQNKFLTLNGKKYYFDNDSKAVTGWQTIDGKKYYFNLNTAEAATGWQTIDGKKYYFNLNTAEAATGWQTIDGKKYYFNTNTFIASTGYTSINGKHFYFNTDGIMQIGVFKGPNGFEYFAPANTHNNNIEGQAILYQNKFLTLNGKKYYFGSDSKAVTGLRTIDGKKYYFNTNTAVAVTGWQTINGKKYYFNTNTSIASTGYTIISGKHFYFNTDGIMQIGVFKGPDGFEYFAPANTDANNIEGQAIRYQNRFLYLHDNIYYFGNNSKAATGWVTIDGNRYYFEPNTAMGANGYKTIDNKNFYFRNGLPQIGVFKGSNGFEYFAPANTDANNIEGQAIRYQNRFLHLLGKIYYFGNNSKAVTGWQTINGKVYYFMPDTAMAAAGGLFEIDGVIYFFGVDGVKAPGIYG

SEQ ID NO: 229 - protein, 204 aa, Clostridium difficile
RYYFDTDTAIAFNGYKTIDGKHFYFDSDCVVKIGVFSTSNGFEYFAPANTYNNNIEGQAIVYQSKFLTLNGKKYYFDNNSKAVTGWQTIDSKKYYFNTNTAEAATGWQTIDGKKYYFNTNTAEAATGWQTIDGKKYYFNTNTAIASTGYTIINGKHFYFNTDGIMQIGVFKGPNGFEYFAPANTDANNIEGQAILYQNEFLTLN

SEQ ID NO: 230 - protein, 457 aa, Clostridium difficile
ILQNGYITIERNNFYFDANNESKMVTGVFKGPNGFEYFAPANTHNNNIEGQAIVYQNKFLTLNGKKYYFDNDSKAVTGWQTIDGKKYYFNLNTAEAATGWQTIDGKKYYFNLNTAEAATGWQTIDGKKYYFNTNTFIASTGYTSINGKHFYFNTDGIMQIGVFKGPNGFEYFAPANTHNNNIEGQAILYQNKFLTLNGKKYYFGSDSKAVTGLRTIDGKKYYFNTNTAVAVTGWQTINGKKYYFNTNTSIASTGYTIISGKHFYFNTDGIMQIGVFKGPDGFEYFAPANTDANNIEGQAIRYQNRFLYLHDNIYYFGNNSKAATGWVTIDGNRYYFEPNTAMGANGYKTIDNKNFYFRNGLPQIGVFKGSNGFEYFAPANTDANNIEGQAIRYQNRFLHLLGKIYYFGNNSKAVTGWQTINGKVYYFMPDTAMAAAGGLFEIDGVIYFFGVDGVKAP

SEQ ID NO: 231 - protein, 320 aa, Clostridium difficile
ASTGYTSINGKHFYFNTDGIMQIGVFKGPNGFEYFAPANTHNNNIEGQAILYQNKFLTLNGKKYYFGSDSKAVTGLRTIDGKKYYFNTNTAVAVTGWQTINGKKYYFNTNTSIASTGYTIISGKHFYFNTDGIMQIGVFKGPDGFEYFAPANTDANNIEGQAIRYQNRFLYLHDNIYYFGNNSKAATGWVTIDGNRYYFEPNTAMGANGYKTIDNKNFYFRNGLPQIGVFKGSNGFEYFAPANTDANNIEGQAIRYQNRFLHLLGKIYYFGNNSKAVTGWQTINGKVYYFMPDTAMAAAGGLFEIDGVIYFFGVDGVKAP

SEQ ID NO: 232 - protein, 864 aa, Clostridium difficile
FDPIEFNLVTGWQTINGKKYYFDINTGAALISYKIINGKHFYFNNDGVMQLGVFKGPDGFEYFAPANTQNNNIEGQAIVYQSKFLTLNGKKYYFDNDSKAVTGWRIINNEKYYFNPNNAIAAVGLQVIDNNKYYFNPDTAIISKGWQTVNGSRYYFDTDTAIAFNGYKTIDGKHFYFDSDCVVKIGVFSTSNGFEYFAPANTYNNNIEGQAIVYQSKFLTLNGKKYYFDNNSKAVTGWQTIDSKKYYFNTNTAEAATGWQTIDGKKYYFNTNTAEAATGWQTIDGKKYYFNTNTAIASTGYTIINGKHFYFNTDGIMQIGVFKGPNGFEYFAPANTDANNIEGQAILYQNEFLTLNGKKYYFGSDSKAVTGWRIINNKKYYFNPNNAIAAIHLCTINNDKYYFSYDGILQNGYITIERNNFYFDANNESKMVTGVFKGPNGFEYFAPANTHNNNIEGQAIVYQNKFLTLNGKKYYFDNDSKAVTGWQTIDGKKYYFNLNTAEAATGWQTIDGKKYYFNLNTAEAATGWQTIDGKKYYFNTNTFIASTGYTSINGKHFYFNTDGIMQIGVFKGPNGFEYFAPANTHNNNIEGQAILYQNKFLTLNGKKYYFGSDSKAVTGLRTIDGKKYYFNTNTAVAVTGWQTINGKKYYFNTNTSIASTGYTIISGKHFYFNTDGIMQIGVFKGPDGFEYFAPANTDANNIEGQAIRYQNRFLYLHDNIYYFGNNSKAATGWVTIDGNRYYFEPNTAMGANGYKTIDNKNFYFRNGLPQIGVFKGSNGFEYFAPANTDANNIEGQAIRYQNRFLHLLGKIYYFGNNSKAVTGWQTINGKVYYFMPDTAMAAAGGLFEIDGVIYFFGVDGVKAP

SEQ ID NO: 233 - protein, 403 aa, Clostridium difficile
YQNKFLTLNGKKYYFDNDSKAVTGWQTIDGKKYYFNLNTAEAATGWQTIDGKKYYFNLNTAEAATGWQTIDGKKYYFNTNTFIASTGYTSINGKHFYFNTDGIMQIGVFKGPNGFEYFAPANTHNNNIEGQAILYQNKFLTLNGKKYYFGSDSKAVTGLRTIDGKKYYFNTNTAVAVTGWQTINGKKYYFNTNTSIASTGYTIISGKHFYFNTDGIMQIGVFKGPDGFEYFAPANTDANNIEGQAIRYQNRFLYLHDNIYYFGNNSKAATGWVTIDGNRYYFEPNTAMGANGYKTIDNKNFYFRNGLPQIGVFKGSNGFEYFAPANTDANNIEGQAIRYQNRFLHLLGKIYYFGNNSKAVTGWQTINGKVYYFMPDTAMAAAGGLFEIDGVIYFFGVDGVKAP

SEQ ID NO: 234 - protein, 872 aa, Clostridium difficile
SLFYFDPIEFNLVTGWQTINGKKYYFDINTGAALISYKIINGKHFYFNNDGVMQLGVFKGPDGFEYFAPANTQNNNIEGQAIVYQSKFLTLNGKKYYFDNDSKAVTGWRIINNEKYYFNPNNAIAAVGLQVIDNNKYYFNPDTAIISKGWQTVNGSRYYFDTDTAIAFNGYKTIDGKHFYFDSDCVVKIGVFSTSNGFEYFAPANTYNNNIEGQAIVYQSKFLTLNGKKYYFDNNSKAVTGWQTIDSKKYYFNTNTAEAATGWQTIDGKKYYFNTNTAEAATGWQTIDGKKYYFNTNTAIASTGYTIINGKHFYFNTDGIMQIGVFKGPNGFEYFAPANTDANNIEGQAILYQNEFLTLNGKKYYFGSDSKAVTGWRIINNKKYYFNPNNAIAAIHLCTINNDKYYFSYDGILQNGYITIERNNFYFDANNESKMVTGVFKGPNGFEYFAPANTHNNNIEGQAIVYQNKFLTLNGKKYYFDNDSKAVTGWQTIDGKKYYFNLNTAEAATGWQTIDGKKYYFNLNTAEAATGWQTIDGKKYYFNTNTFIASTGYTSINGKHFYFNTDGIMQIGVFKGPNGFEYFAPANTHNNNIEGQAILYQNKFLTLNGKKYYFGSDSKAVTGLRTIDGKKYYFNTNTAVAVTGWQTINGKKYYFNTNTSIASTGYTIISGKHFYFNTDGIMQIGVFKGPDGFEYFAPANTDANNIEGQAIRYQNRFLYLHDNIYYFGNNSKAATGWVTIDGNRYYFEPNTAMGANGYKTIDNKNFYFRNGLPQIGVFKGSNGFEYFAPANTDANNIEGQAIRYQNRFLHLLGKIYYFGNNSKAVTGWQTINGKVYYFMPDTAMAAAGGLFEIDGVIYFFGVDGVKAPGIYG

SEQ ID NO: 235 - protein, 743 aa, Clostridium difficile
AVGLQVIDNNKYYFNPDTAIISKGWQTVNGSRYYFDTDTAIAFNGYKTIDGKHFYFDSDCVVKIGVFSTSNGFEYFAPANTYNNNIEGQAIVYQSKFLTLNGKKYYFDNNSKAVTGWQTIDSKKYYFNTNTAEAATGWQTIDGKKYYFNTNTAEAATGWQTIDGKKYYFNTNTAIASTGYTIINGKHFYFNTDGIMQIGVFKGPNGFEYFAPANTDANNIEGQAILYQNEFLTLNGKKYYFGSDSKAVTGWRIINNKKYYFNPNNAIAAIHLCTINNDKYYFSYDGILQNGYITIERNNFYFDANNESKMVTGVFKGPNGFEYFAPANTHNNNIEGQAIVYQNKFLTLNGKKYYFDNDSKAVTGWQTIDGKKYYFNLNTAEAATGWQTIDGKKYYFNLNTAEAATGWQTIDGKKYYFNTNTFIASTGYTSINGKHFYFNTDGIMQIGVFKGPNGFEYFAPANTHNNNIEGQAILYQNKFLTLNGKKYYFGSDSKAVTGLRTIDGKKYYFNTNTAVAVTGWQTINGKKYYFNTNTSIASTGYTIISGKHFYFNTDGIMQIGVFKGPDGFEYFAPANTDANNIEGQAIRYQNRFLYLHDNIYYFGNNSKAATGWVTIDGNRYYFEPNTAMGANGYKTIDNKNFYFRNGLPQIGVFKGSNGFEYFAPANTDANNIEGQAIRYQNRFLHLLGKIYYFGNNSKAVTGWQTINGKVYYFMPDTAMAAAGGLFEIDGVIYFFGVDGVKAP

SEQ ID NO: 236 - protein, 816 aa, Clostridium difficile
MQLGVFKGPDGFEYFAPANTQNNNIEGQAIVYQSKFLTLNGKKYYFDNDSKAVTGWRIINNEKYYFNPNNAIAAVGLQVIDNNKYYFNPDTAIISKGWQTVNGSRYYFDTDTAIAFNGYKTIDGKHFYFDSDCVVKIGVFSTSNGFEYFAPANTYNNNIEGQAIVYQSKFLTLNGKKYYFDNNSKAVTGWQTIDSKKYYFNTNTAEAATGWQTIDGKKYYFNTNTAEAATGWQTIDGKKYYFNTNTAIASTGYTIINGKHFYFNTDGIMQIGVFKGPNGFEYFAPANTDANNIEGQAILYQNEFLTLNGKKYYFGSDSKAVTGWRIINNKKYYFNPNNAIAAIHLCTINNDKYYFSYDGILQNGYITIERNNFYFDANNESKMVTGVFKGPNGFEYFAPANTHNNNIEGQAIVYQNKFLTLNGKKYYFDNDSKAVTGWQTIDGKKYYFNLNTAEAATGWQTIDGKKYYFNLNTAEAATGWQTIDGKKYYFNTNTFIASTGYTSINGKHFYFNTDGIMQIGVFKGPNGFEYFAPANTHNNNIEGQAILYQNKFLTLNGKKYYFGSDSKAVTGLRTIDGKKYYFNTNTAVAVTGWQTINGKKYYFNTNTSIASTGYTIISGKHFYFNTDGIMQIGVFKGPDGFEYFAPANTDANNIEGQAIRYQNRFLYLHDNIYYFGNNSKAATGWVTIDGNRYYFEPNTAMGANGYKTIDNKNFYFRNGLPQIGVFKGSNGFEYFAPANTDANNIEGQAIRYQNRFLHLLGKIYYFGNNSKAVTGWQTINGKVYYFMPDTAMAAAGGLFEIDGVIYFFGVDGVKAP

SEQ ID NO: 237 - protein, 767 aa, Clostridium difficile
MSLVNRKQLEKMANVRFRTQEDEYVAILDALEEYHNMSENTVVEKYLKLKDINSLTDIYIDTYKKSGRNKALKKFKEYLVTEVLELKNNNLTPVEKNLHFVWIGGQINDTAINYINQWKDVNSDYNVNVFYDSNAFLINTLKKTVVESAINDTLESFRENLNDPRFDYNKFFRKRMEIIYDKQKNFINYYKAQREENPELIIDDIVKTYLSNEYSKEIDELNTYIEESLNKITQNSGNDVRNFEEFKNGESFNLYEQELVERWNLAAASDILRISALKEIGGMYLDVDMLPGIQPDLFESIEKPSSVTVDFWEMTKLEAIMKYKEYIPEYTSEHFDMLDEEVQSSFESVLASKSDKSEIFSSLGDMEASPLEVKIAFNSKGIINQGLISVKDSYCSNLIVKQIENRYKILNNSLNPAISEDNDFNTTTNTFIDSIMAEANADNGRFMMELGKYLRVGFFPDVKTTINLSGPEAYAAAYQDLLMFKEGSMNIHLIEADLRNFEISKTNISQSTEQEMASLWSFDDARAKAQFEEYKRNYFEGSLGEDDNLDFSQNIVVDKEYLLEKISSLARSSERGYIHYIVQLQGDKISYEAACNLFAKTPYDSVLFQKNIEDSEIAYYYNPGDGEIQEIDKYKIPSIISDRPKIKLTFIGHGKDEFNTDIFAGFDVDSLSTEIEAAIDLAKEDISPKSIEINLLGCNMFSYSINVEETYPGKLLLKVKDKISELMPSISQDSIIVSANQYEVRINSEGRRELLDHSGEWINKEES

SEQ ID NO: 238 - protein, 543 aa, Clostridium difficile; identical to SEQ ID NO: 31

SEQ ID NO: 239 - protein, 224 aa, Clostridium difficile; identical to SEQ ID NO: 33

SEQ ID NO: 240 - protein, 1066 aa, Clostridium difficile
IIKDISSKEYISFNPKENKITVKSKNLPELSTLLQEIRNNSNSSDIELEEKVMLTECEINVISNIDTQIVEERIEEAKNLTSDSINYIKDEFKLIESISDALCDLKQQNELEDSHFISFEDISETDEGFSIRFINKETGESIFVETEKTIFSEYANHITEEISKIKGTIFDTVNGKLVKKVNLDTTHEVNTLNAAFFIQSLIEYNSSKESLSNLSVAMKVQVYAQLFSTGLNTITDAAKVVELVSTALDETIDLLPTLSEGLPIIATIIDGVSLGAAIKELSETSDPLLRQEIEAKIGIMAVNLTTATTAIITSSLGIASGFSILLVPLAGISAGIPSLVNNELVLRDKATKVVDYFKHVSLVETEGVFTLLDDKIMMPQDDLVISEIDFNNNSIVLGKCEIWRMEGGSGHTVTDDIDHFFSAPSITYREPHLSIYDVLEVQKEELDLSKDLMVLPNAPNRVFAWETGWTPGLRSLENDGTKLLDRIRDNYEGEFYWRYFAFIADALITTLKPRYEDTNIRINLDSNTRSFIVPIITTEYIREKLSYSFYGSGGTYALSLSQYNMGINIELSESDVWIIDVDNVVRDVTIESDKIKKGDLIEGILSTLSIEENKIILNSHEINFSGEVNGSNGFVSLTFSILEGINAIIEVDLLSKSYKLLISGELKILMLNSNHIQQKIDYIGFNSELQKNIPYSFVDSEGKENGFINGSTKEGLFVSELPDVVLISKVYMDDSKPSFGYYSNNLKDVKVITKDNVNILTGYYLKDDIKISLSLTLQDEKTIKLNSVHLDESGVAEILKFMNRKGNTNTSDSLMSFLESMNIKSIFVNFLQSNIKFILDANFIISGTTSIGQFEFICDENDNIQPYFIKFNTLETNYTLYVGNRQNMIVEPNYDLDDSGDISSTVINFSQKYLYGIDSCVNKVVISPNIYTDEINITPVYETNNTYPEVIVLDANYINEKINVNINDLSIRYVWSNDGNDFILMSTSEENKVSQVKIRFVNVFKDKTLANKLSFNFSDKQDVPVSEIILSFTPSYYEDGLIGYDLGLVSLYNEKFYINNFGMMVS

SEQ ID NO: 241 - protein, 514 aa, Clostridium difficile
ITGFVTVGDDKYYFNPINGGAASIGETIIDDKNYYFNQSGVLQTGVFSTEDGFKYFAPANTLDENLEGEAIDFTGKLIIDENIYYFDDNYRGAVEWKELDGEMHYFSPETGKAFKGLNQIGDYKYYFNSDGVMQKGFVSINDNKHYFDDSGVMKVGYTEIDGKHFYFAENGEMQIGVFNTEDGFKYFAHHNEDLGNEEGEEISYSGILNFNNKIYYFDDSFTAVVGWKDLEDGSKYYFDEDTAEAYIGLSLINDGQYYFNDDGIMQVGFVTINDKVFYFSDSGIIESGVQNIDDNYFYIDDNGIVQIGVFDTSDGYKYFAPANTVNDNIYGQAVEYSGLVRVGEDVYYFGETYTIETGWIYDMENESDKYYFNPETKKACKGINLIDDIKYYFDEKGIMRTGLISFENNNYYFNENGEMQFGYINIEDKMFYFGEDGVMQIGVFNTPDGFKYFAHQNTLDENFEGESINYTGWLDLDEKRYYFTDEYIAATGSVIIDGEEYYFDPDTAQLVISE

SEQ ID NO: 242 - protein, 210 aa, Clostridium difficile
VQIGVFDTSDGYKYFAPANTVNDNIYGQAVEYSGLVRVGEDVYYFGETYTIETGWIYDMENESDKYYFNPETKKACKGINLIDDIKYYFDEKGIMRTGLISFENNNYYFNENGEMQFGYINIEDKMFYFGEDGVMQIGVFNTPDGFKYFAHQNTLDENFEGESINYTGWLDLDEKRYYFTDEYIAATGSVIIDGEEYYFDPDTAQLVISE

SEQ ID NO: 243 - protein, 311 aa, Clostridium difficile
YSGILNFNNKIYYFDDSFTAVVGWKDLEDGSKYYFDEDTAEAYIGLSLINDGQYYFNDDGIMQVGFVTINDKVFYFSDSGIIESGVQNIDDNYFYIDDNGIVQIGVFDTSDGYKYFAPANTVNDNIYGQAVEYSGLVRVGEDVYYFGETYTIETGWIYDMENESDKYYFNPETKKACKGINLIDDIKYYFDEKGIMRTGLISFENNNYYFNENGEMQFGYINIEDKMFYFGEDGVMQIGVFNTPDGFKYFAHQNTLDENFEGESINYTGWLDLDEKRYYFTDEYIAATGSVIIDGEEYYFDPDTAQLVISE

SEQ ID NO: 244 - protein, 768 aa, Artificial Sequence
  Synthetic amino acid sequence
SLISKEELIKLAYSIRPRENEYKTILTNLDEYNKLTTNNNENKYLQLKKLNESIDVFMNKYKTSSRNRALSNLKKDILKEVILIKNSNTSPVEKNLHFVWIGGEVSDIALEYIKQWADINAEYNIKLWYDSEAFLVNTLKKAIVESSTTEALQLLEEEIQNPQFDNMKFYKKRMEFIYDRQKRFINYYKSQINKPTVPTIDDIIKSHLVSEYNRDETVLESYRTNSLRKINSNHGIDIRANSLFTEQELLNIYSQELLNRGNLAAASDIVRLLALKNFGGVALAVAMLPGIHSDLFKTISRPSSIGLDRWEMIKLEAIMKYKKYINNYTSENFDKLDQQLKDNFKLIIESKSEKSEIFSKLENLNVSDLEIKIAFALGSVINQALISKQGSYLTNLVIEQVKNRYQFLNQHLNPAIESDNNFTDTTKIFHDSLFNSATAENSMFLTKIAPYLQVGFMPEARSTISLSGPGAYASAYYDFINLQENTIEKTLKASDLIEFKFPENNLSQLTEQEINSLWSFDQASAKYQFEKYVRDYTGGSLSEDNGVDFNKNTALDKNYLLNNKIPSNNVEEAGSKNYVHYIIQLQGDDISYEATCNLFSKNPKNSIIIQRNMNESAKSYFLSDDGESILELNKYRIPERLKNKEKVKVTFIGHGKDEFNTSEFARLSVDSLSNEISSFLDTIKLDISPKNVEVNLLGCNMFSYDFNVEETYPGKLLLSIMDKITSTLPDVNKNSITIGANQYEVRINSEGRKELLAHSGKWINKEEA

SEQ ID NO: 245 - protein, 540 aa, Artificial Sequence
  Synthetic amino acid sequence
SLISKEELIKLAYSIRPRENEYKTILTNLDEYNKLTTNNNENKYLQLKKLNESIDVFMNKYKTSSRNRALSNLKKDILKEVILIKNSNTSPVEKNLHFVWIGGEVSDIALEYIKQWADINAEYNIKLWYDSEAFLVNTLKKAIVESSTTEALQLLEEEIQNPQFDNMKFYKKRMEFIYDRQKRFINYYKSQINKPTVPTIDDIIKSHLVSEYNRDETVLESYRTNSLRKINSNHGIDIRANSLFTEQELLNIYSQELLNRGNLAAASDIVRLLALKNFGGVALAVAMLPGIHSDLFKTISRPSSIGLDRWEMIKLEAIMKYKKYINNYTSENFDKLDQQLKDNFKLIIESKSEKSEIFSKLENLNVSDLEIKIAFALGSVINQALISKQGSYLTNLVIEQVKNRYQFLNQHLNPAIESDNNFTDTTKIFHDSLFNSATAENSMFLTKIAPYLQVGFMPEARSTISLSGPGAYASAYYDFINLQENTIEKTLKASDLIEFKFPENNLSQLTEQEINSLWSFDQASAKYQFEKYVRDYTGGS

SEQ ID NO: 246 - protein, 766 aa, Artificial Sequence
  Synthetic amino acid sequence
SLVNRKQLEKMANVRFRTQEDEYVAILDALEEYHNMSENTVVEKYLKLKDINSLTDIYIDTYKKSGRNKALKKFKEYLVTEVLELKNNNLTPVEKNLHFVWIGGQINDTAINYINQWKDVNSDYNVNVFYDSNAFLINTLKKTVVESAINDTLESFRENLNDPRFDYNKFFRKRMEIIYDKQKNFINYYKAQREENPELIIDDIVKTYLSNEYSKEIDELNTYIEESLNKITQNSGNDVRNFEEFKNGESFNLYEQELVERWNLAAASAILAISALKEIGGMALAVAMLPGIQPDLFESIEKPSSVTVDFWEMTKLEAIMKYKEYIPEYTSEHFDMLDEEVQSSFESVLASKSDKSEIFSSLGDMEASPLEVKIAFNSKGIINQGLISVKDSYCSNLIVKQIENRYKILNNSLNPAISEDNDFNTTTNTFIDSIMAEANADNGRFMMELGKYLRVGFFPDVKTTINLSGPEAYAAAYQDLLMFKEGSMNIHLIEADLRNFEISKTNISQSTEQEMASLWSFDDARAKAQFEEYKRNYFEGSLGEDDNLDFSQNIVVDKEYLLEKISSLARSSERGYIHYIVQLQGNKISYEAACNLFAKTPYDSVLFQKNIEDSEIAYYYNPGDGEIQEIDKYKIPSIISDRPKIKLTFIGAGKDEFNTDIFAGFDVDSLSTEIEAAIDLAKEDISPKSIEINLLGANMFSYSINVEETYPGKLLLKVKDKISELMPSISQDSIIVSANQYEVRINSEGRRELLDHSGEWINKEES

SEQ ID NO: 247 - protein, 542 aa, Artificial Sequence
  Synthetic amino acid sequence
SLVNRKQLEKMANVRFRTQEDEYVAILDALEEYHNMSENTVVEKYLKLKDINSLTDIYIDTYKKSGRNKALKKFKEYLVTEVLELKNNNLTPVEKNLHFVWIGGQINDTAINYINQWKDVNSDYNVNVFYDSNAFLINTLKKTVVESAINDTLESFRENLNDPRFDYNKFFRKRMEIIYDKQKNFINYYKAQREENPELIIDDIVKTYLSNEYSKEIDELNTYIEESLNKITQNSGNDVRNFEEFKNGESFNLYEQELVERWNLAAASAILAISALKEIGGMALAVAMLPGIQPDLFESIEKPSSVTVDFWEMTKLEAIMKYKEYIPEYTSEHFDMLDEEVQSSFESVLASKSDKSEIFSSLGDMEASPLEVKIAFNSKGIINQGLISVKDSYCSNLIVKQIENRYKILNNSLNPAISEDNDFNTTTNTFIDSIMAEANADNGRFMMELGKYLRVGFFPDVKTTINLSGPEAYAAAYQDLLMFKEGSMNIHLIEADLRNFEISKTNISQSTEQEMASLWSFDDARAKAQFEEYKRNYFEGSL

SEQ ID NO: 248 - protein, 228 aa, Artificial Sequence
  Synthetic amino acid sequence
LSEDNGVDFNKNTALDKNYLLNNKIPSNNVEEAGSKNYVHYIIQLQGNDISYEATCNLFSKNPKNSIIIQRNMNESAKSYFLSDDGESILELNKYRIPERLKNKEKVKVTFIGAGKDEFNTSEFARLSVDSLSNEISSFLDTIKLDISPKNVEVNLLGANMFSYDFNVEETYPGKLLLSIMDKITSTLPDVNKNSITIGANQYEVRINSEGRKELLAHSGKWINKEEA

SEQ ID NO: 249 - protein, 224 aa, Artificial Sequence
  Synthetic amino acid sequence
GEDDNLDFSQNIVVDKEYLLEKISSLARSSERGYIHYIVQLQGNKISYEAACNLFAKTPYDSVLFQKNIEDSEIAYYYNPGDGEIQEIDKYKIPSIISDRPKIKLTFIGAGKDEFNTDIFAGFDVDSLSTEIEAAIDLAKEDISPKSIEINLLGANMFSYSINVEETYPGKLLLKVKDKISELMPSISQDSIIVSANQYEVRINSEGRRELLDHSGEWINKEES

SEQ ID NO: 250 - protein, 322 aa, Artificial Sequence
  Synthetic amino acid sequence
ASTGYTSINGKHFYFNTDGIMQIGVFKGPNGFEYFAPANTHNNNIEGQAILYQNKFLTLNGKKYYFGSDSKAVTGLRTIDGKKYYFNTNTAVAVTGWQTINGKKYYFNTNTSIASTGYTIISGKHFYFNTDGIMQIGVFKGPDGFEYFAPANTDANNIEGQAIRYQNRFLYLHDNIYYFGNNSKAATGWVTIDGNRYYFEPNTAMGANGYKTIDNKNFYFRNGLPQIGVFKGSNGFEYFAPANTDANNIEGQAIRYQNRFLHLLGKIYYFGNNSKAVTGWQTINGKVYYFMPDTAMAAAGGLFEIDGVIYFFGVDGVKAPLE

SEQ ID NO: 251 - protein, 320 aa, Artificial Sequence
  Synthetic amino acid sequence
ASTGYTSINGKHFYFNTDGIMQIGVFKGPNGFEYFAPANTDNNNIEGQAILYQNKFLTLNGKKYYFGSDSKAVTGLRTIDGKKYYFNTNTAVAVTGWQTINGKKYYFNTNTSIASTGYTIISGKHFYFNTDGIMQIGVFKGPDGFEYFAPANTDANNIEGQAIRYQNRFLYLHDNIYYFGNNSKAATGWVTIDGNRYYFEPNTAMGANGYKTIDNKNFYFRNGLPQIGVFKGSNGFEYFAPANTDANNIEGQAIRYQNRFLHLLGKIYYFGNNSKAVTGWQTINGKVYYFMPDTAMAAAGGLFEIDGVIYFFGVDGVKAP

SEQ ID NO: 252 - protein, 320 aa, Artificial Sequence
  Synthetic amino acid sequence
ASTGYTSINGKHFYFNTDGIMQIGVFKGPNGFEYFAPANTHANNIEGQAILYQNKFLTLNGKKYYFGSDSKAVTGLRTIDGKKYYFNTNTAVAVTGWQTINGKKYYFNTNTSIASTGYTIISGKHFYFNTDGIMQIGVFKGPDGFEYFAPANTDANNIEGQAIRYQNRFLYLHDNIYYFGNNSKAATGWVTIDGNRYYFEPNTAMGANGYKTIDNKNFYFRNGLPQIGVFKGSNGFEYFAPANTDANNIEGQAIRYQNRFLHLLGKIYYFGNNSKAVTGWQTINGKVYYFMPDTAMAAAGGLFEIDGVIYFFGVDGVKAP

SEQ ID NO: 253 - protein, 320 aa, Artificial Sequence; identical to SEQ ID NO: 185
  Synthetic amino acid sequence

SEQ ID NO: 254 - protein, 872 aa, Clostridium difficile
HMSLVNRKQLEKMANVRFRTQEDEYVAILDALEEYHNMSENTVVEKYLKLKDINSLTDIYIDTYKKSGRNKALKKFKEYLVTEVLELKNNNLTPVEKNLHFVWIGGQINDTAINYINQWKDVNSDYNVNVFYDSNAFLINTLKKTVVESAINDTLESFRENLNDPRFDYNKFFRKRMEIIYDKQKNFINYYKAQREENPELIIDDIVKTYLSNEYSKEIDELNTYIEESLNKITQNSGNDVRNFEEFKNGESFNLYEQELVERWNLAAASAILAISALKEIGGMALAVAMLPGIQPDLFESIEKPSSVTVDFWEMTKLEAIMKYKEYIPEYTSEHFDMLDEEVQSSFESVLASKSDKSEIFSSLGDMEASPLEVKIAFNSKGIINQGLISVKDSYCSNLIVKQIENRYKILNNSLNPAISEDNDFNTTTNTFIDSIMAEANADNGRFMMELGKYLRVGFFPDVKTTINLSGPEAYAAAYQDLLMFKEGSMNIHLIEADLRNFEISKTNISQSTEQEMASLWSFDDARAKAQFEEYKRNYFEGSLGSGGGGASTGYTSINGKHFYFNTDGIMQIGVFKGPNGFEYFAPANTHNNNIEGQAILYQNKFLTLNGKKYYFGSDSKAVTGLRTIDGKKYYFNTNTAVAVTGWQTINGKKYYFNTNTSIASTGYTIISGKHFYFNTDGIMQIGVFKGPDGFEYFAPANTDANNIEGQAIRYQNRFLYLHDNIYYFGNNSKAATGWVTIDGNRYYFEPNTAMGANGYKTIDNKNFYFRNGLPQIGVFKGSNGFEYFAPANTDANNIEGQAIRYQNRFLHLLGKIYYFGNNSKAVTGWQTINGKVYYFMPDTAMAAAGGLFEIDGVIYFFGVDGVKAPLE

SEQ ID NO: 255 - protein, 206 aa, Artificial Sequence
  Synthetic amino acid sequence
RYYFDTDTAIAFNGYKTIDGKHFYFDSDCVVKIGVFSTSNGFEYFAPANTYNNNIEGQAIVYQSKFLTLNGKKYYFDNNSKAVTGWQTIDSKKYYFNTNTAEAATGWQTIDGKKYYFNTNTAEAATGWQTIDGKKYYFNTNTAIASTGYTIINGKHFYFNTDGIMQIGVFKGPNGFEYFAPANTDANNIEGQAILYQNEFLTLNLE

SEQ ID NO: 256 - protein, 865 aa, Artificial Sequence
  Synthetic amino acid sequence
DPIEFNLVTGWQTINGKKYYFDINTGAALISYKIINGKHFYFNNDGVMQLGVFKGPDGFEYFAPANTQNNNIEGQAIVYQSKFLTLNGKKYYFDNDSKAVTGWRIINNEKYYFNPNNAIAAVGLQVIDNNKYYFNPDTAIISKGWQTVNGSRYYFDTDTAIAFNGYKTIDGKHFYFDSDCVVKIGVFSTSNGFEYFAPANTYNNNIEGQAIVYQSKFLTLNGKKYYFDNNSKAVTGWQTIDSKKYYFNTNTAEAATGWQTIDGKKYYFNTNTAEAATGWQTIDGKKYYFNTNTAIASTGYTIINGKHFYFNTDGIMQIGVFKGPNGFEYFAPANTDANNIEGQAILYQNEFLTLNGKKYYFGSDSKAVTGWRIINNKKYYFNPNNAIAAIHLCTINNDKYYFSYDGILQNGYITIERNNFYFDANNESKMVTGVFKGPNGFEYFAPANTHNNNIEGQAIVYQNKFLTLNGKKYYFDNDSKAVTGWQTIDGKKYYFNLNTAEAATGWQTIDGKKYYFNLNTAEAATGWQTIDGKKYYFNTNTFIASTGYTSINGKHFYFNTDGIMQIGVFKGPNGFEYFAPANTHNNNIEGQAILYQNKFLTLNGKKYYFGSDSKAVTGLRTIDGKKYYFNTNTAVAVTGWQTINGKKYYFNTNTSIASTGYTIISGKHFYFNTDGIMQIGVFKGPDGFEYFAPANTDANNIEGQAIRYQNRFLYLHDNIYYFGNNSKAATGWVTIDGNRYYFEPNTAMGANGYKTIDNKNFYFRNGLPQIGVFKGSNGFEYFAPANTDANNIEGQAIRYQNRFLHLLGKIYYFGNNSKAVTGWQTINGKVYYFMPDTAMAAAGGLFEIDGVIYFFGVDGVKAPLE

SEQ ID NO: 257 - protein, 459 aa, Artificial Sequence
  Synthetic amino acid sequence
ILQNGYITIERNNFYFDANNESKMVTGVFKGPNGFEYFAPANTHNNNIEGQAIVYQNKFLTLNGKKYYFDNDSKAVTGWQTIDGKKYYFNLNTAEAATGWQTIDGKKYYFNLNTAEAATGWQTIDGKKYYFNTNTFIASTGYTSINGKHFYFNTDGIMQIGVFKGPNGFEYFAPANTHNNNIEGQAILYQNKFLTLNGKKYYFGSDSKAVTGLRTIDGKKYYFNTNTAVAVTGWQTINGKKYYFNTNTSIASTGYTIISGKHFYFNTDGIMQIGVFKGPDGFEYFAPANTDANNIEGQAIRYQNRFLYLHDNIYYFGNNSKAATGWVTIDGNRYYFEPNTAMGANGYKTIDNKNFYFRNGLPQIGVFKGSNGFEYFAPANTDANNIEGQAIRYQNRFLHLLGKIYYFGNNSKAVTGWQTINGKVYYFMPDTAMAAAGGLFEIDGVIYFFGVDGVKAPLE

SEQ ID NO: 258 - protein, 888 aa, Artificial Sequence
  Synthetic amino acid sequence
GSSHHHHHHENLYFQGSLFYFDPIEFNLVTGWQTINGKKYYFDINTGAALISYKIINGKHFYFNNDGVMQLGVFKGPDGFEYFAPANTQNNNIEGQAIVYQSKFLTLNGKKYYFDNDSKAVTGWRIINNEKYYFNPNNAIAAVGLQVIDNNKYYFNPDTAIISKGWQTVNGSRYYFDTDTAIAFNGYKTIDGKHFYFDSDCVVKIGVFSTSNGFEYFAPANTYNNNIEGQAIVYQSKFLTLNGKKYYFDNNSKAVTGWQTIDSKKYYFNTNTAEAATGWQTIDGKKYYFNTNTAEAATGWQTIDGKKYYFNTNTAIASTGYTIINGKHFYFNTDGIMQIGVFKGPNGFEYFAPANTDANNIEGQAILYQNEFLTLNGKKYYFGSDSKAVTGWRIINNKKYYFNPNNAIAAIHLCTINNDKYYFSYDGILQNGYITIERNNFYFDANNESKMVTGVFKGPNGFEYFAPANTHNNNIEGQAIVYQNKFLTLNGKKYYFDNDSKAVTGWQTIDGKKYYFNLNTAEAATGWQTIDGKKYYFNLNTAEAATGWQTIDGKKYYFNTNTFIASTGYTSINGKHFYFNTDGIMQIGVFKGPNGFEYFAPANTHNNNIEGQAILYQNKFLTLNGKKYYFGSDSKAVTGLRTIDGKKYYFNTNTAVAVTGWQTINGKKYYFNTNTSIASTGYTIISGKHFYFNTDGIMQIGVFKGPDGFEYFAPANTDANNIEGQAIRYQNRFLYLHDNIYYFGNNSKAATGWVTIDGNRYYFEPNTAMGANGYKTIDNKNFYFRNGLPQIGVFKGSNGFEYFAPANTDANNIEGQAIRYQNRFLHLLGKIYYFGNNSKAVTGWQTINGKVYYFMPDTAMAAAGGLFEIDGVIYFFGVDGVKAPGIYG

SEQ ID NO: 259 - protein, 832 aa, Artificial Sequence
  Synthetic amino acid sequence
GSSHHHHHHENLYFQGMQLGVFKGPDGFEYFAPANTQNNNIEGQAIVYQSKFLTLNGKKYYFDNDSKAVTGWRIINNEKYYFNPNNAIAAVGLQVIDNNKYYFNPDTAIISKGWQTVNGSRYYFDTDTAIAFNGYKTIDGKHFYFDSDCVVKIGVFSTSNGFEYFAPANTYNNNIEGQAIVYQSKFLTLNGKKYYFDNNSKAVTGWQTIDSKKYYFNTNTAEAATGWQTIDGKKYYFNTNTAEAATGWQTIDGKKYYFNTNTAIASTGYTIINGKHFYFNTDGIMQIGVFKGPNGFEYFAPANTDANNIEGQAILYQNEFLTLNGKKYYFGSDSKAVTGWRIINNKKYYFNPNNAIAAIHLCTINNDKYYFSYDGILQNGYITIERNNFYFDANNESKMVTGVFKGPNGFEYFAPANTHNNNIEGQAIVYQNKFLTLNGKKYYFDNDSKAVTGWQTIDGKKYYFNLNTAEAATGWQTIDGKKYYFNLNTAEAATGWQTIDGKKYYFNTNTFIASTGYTSINGKHFYFNTDGIMQIGVFKGPNGFEYFAPANTHNNNIEGQAILYQNKFLTLNGKKYYFGSDSKAVTGLRTIDGKKYYFNTNTAVAVTGWQTINGKKYYFNTNTSIASTGYTIISGKHFYFNTDGIMQIGVFKGPDGFEYFAPANTDANNIEGQAIRYQNRFLYLHDNIYYFGNNSKAATGWVTIDGNRYYFEPNTAMGANGYKTIDNKNFYFRNGLPQIGVFKGSNGFEYFAPANTDANNIEGQAIRYQNRFLHLLGKIYYFGNNSKAVTGWQTINGKVYYFMPDTAMAAAGGLFEIDGVIYFFGVDGVKAP

SEQ ID NO: 260 - protein, 759 aa, Artificial Sequence
  Synthetic amino acid sequence
GSSHHHHHHENLYFQGAVGLQVIDNNKYYFNPDTAIISKGWQTVNGSRYYFDTDTAIAFNGYKTIDGKHFYFDSDCVVKIGVFSTSNGFEYFAPANTYNNNIEGQAIVYQSKFLTLNGKKYYFDNNSKAVTGWQTIDSKKYYFNTNTAEAATGWQTIDGKKYYFNTNTAEAATGWQTIDGKKYYFNTNTAIASTGYTIINGKHFYFNTDGIMQIGVFKGPNGFEYFAPANTDANNIEGQAILYQNEFLTLNGKKYYFGSDSKAVTGWRIINNKKYYFNPNNAIAAIHLCTINNDKYYFSYDGILQNGYITIERNNFYFDANNESKMVTGVFKGPNGFEYFAPANTHNNNIEGQAIVYQNKFLTLNGKKYYFDNDSKAVTGWQTIDGKKYYFNLNTAEAATGWQTIDGKKYYFNLNTAEAATGWQTIDGKKYYFNTNTFIASTGYTSINGKHFYFNTDGIMQIGVFKGPNGFEYFAPANTHNNNIEGQAILYQNKFLTLNGKKYYFGSDSKAVTGLRTIDGKKYYFNTNTAVAVTGWQTINGKKYYFNTNTSIASTGYTIISGKHFYFNTDGIMQIGVFKGPDGFEYFAPANTDANNIEGQAIRYQNRFLYLHDNIYYFGNNSKAATGWVTIDGNRYYFEPNTAMGANGYKTIDNKNFYFRNGLPQIGVFKGSNGFEYFAPANTDANNIEGQAIRYQNRFLHLLGKIYYFGNNSKAVTGWQTINGKVYYFMPDTAMAAAGGLFEIDGVIYFFGVDGVKAP

SEQ ID NO: 261 - protein, 419 aa, Artificial Sequence
  Synthetic amino acid sequence
GSSHHHHHHENLYFQGYQNKFLTLNGKKYYFDNDSKAVTGWQTIDGKKYYFNLNTAEAATGWQTIDGKKYYFNLNTAEAATGWQTIDGKKYYFNTNTFIASTGYTSINGKHFYFNTDGIMQIGVFKGPNGFEYFAPANTHNNNIEGQAILYQNKFLTLNGKKYYFGSDSKAVTGLRTIDGKKYYFNTNTAVAVTGWQTINGKKYYFNTNTSIASTGYTIISGKHFYFNTDGIMQIGVFKGPDGFEYFAPANTDANNIEGQAIRYQNRFLYLHDNIYYFGNNSKAATGWVTIDGNRYYFEPNTAMGANGYKTIDNKNFYFRNGLPQIGVFKGSNGFEYFAPANTDANNIEGQAIRYQNRFLHLLGKIYYFGNNSKAVTGWQTINGKVYYFMPDTAMAAAGGLFEIDGVIYFFGVDGVKAP

SEQ ID NO: 262 - protein, 244 aa, Artificial Sequence
  Synthetic amino acid sequence
GSSHHHHHHENLYFQGLSEDNGVDFNKNTALDKNYLLNNKIPSNNVEEAGSKNYVHYIIQLQGNDISYEATCNLFSKNPKNSIIIQRNMNESAKSYFLSDDGESILELNKYRIPERLKNKEKVKVTFIGAGKDEFNTSEFARLSVDSLSNEISSFLDTIKLDISPKNVEVNLLGANMFSYDFNVEETYPGKLLLSIMDKITSTLPDVNKNSITIGANQYEVRINSEGRKELLAHSGKWINKEEA

SEQ ID NO: 263 - protein, 281 aa, Artificial Sequence
  Synthetic amino acid sequence
GSSHHHHHHENLYFQGEDINVFMKDDINTITGKYYVDNNTDKSIDFSISLVSKNQVKVNGLYLNESVYSSYLDFVKNSDGHHNTSNFMNLFLDNISFWKLFGFENINFVIDKYFTLVGKTNLGYVEFICDNNKNIDIYFGEWKTSSSKSTIFSGNGRNVVVEPIYNPDTGEDISTSLDFSYEPLYGIDRYINKVLIAPDLYTSLININTNYYSNEYYPEIIVLNPNTFHKKVNINLDSSSFEYKWSTEGSDFILVRYLEESNKKILQKIRIKGILSNTQSF

SEQ ID NO: 264 - protein, 240 aa, Artificial Sequence
  Synthetic amino acid sequence
GSSHHHHHHENLYFQGGEDDNLDFSQNIVVDKEYLLEKISSLARSSERGYIHYIVQLQGNKISYEAACNLFAKTPYDSVLFQKNIEDSEIAYYYNPGDGEIQEIDKYKIPSIISDRPKIKLTFIGAGKDEFNTDIFAGFDVDSLSTEIEAAIDLAKEDISPKSIEINLLGANMFSYSINVEETYPGKLLLKVKDKISELMPSISQDSIIVSANQYEVRINSEGRRELLDHSGEWINKEES

SEQ ID NO: 265 - protein, 782 aa, Artificial Sequence
  Synthetic amino acid sequence
GSSHHHHHHENLYFQGSLVNRKQLEKMANVRFRTQEDEYVAILDALEEYHNMSENTVVEKYLKLKDINSLTDIYIDTYKKSGRNKALKKFKEYLVTEVLELKNNNLTPVEKNLHFVWIGGQINDTAINYINQWKDVNSDYNVNVFYDSNAFLINTLKKTVVESAINDTLESFRENLNDPRFDYNKFFRKRMEIIYDKQKNFINYYKAQREENPELIIDDIVKTYLSNEYSKEIDELNTYIEESLNKITQNSGNDVRNFEEFKNGESFNLYEQELVERWNLAAASAILAISALKEIGGMALAVAMLPGIQPDLFESIEKPSSVTVDFWEMTKLEAIMKYKEYIPEYTSEHFDMLDEEVQSSFESVLASKSDKSEIFSSLGDMEASPLEVKIAFNSKGIINQGLISVKDSYCSNLIVKQIENRYKILNNSLNPAISEDNDFNTTTNTFIDSIMAEANADNGRFMMELGKYLRVGFFPDVKTTINLSGPEAYAAAYQDLLMFKEGSMNIHLIEADLRNFEISKTNISQSTEQEMASLWSFDDARAKAQFEEYKRNYFEGSLGEDDNLDFSQNIVVDKEYLLEKISSLARSSERGYIHYIVQLQGNKISYEAACNLFAKTPYDSVLFQKNIEDSEIAYYYNPGDGEIQEIDKYKIPSIISDRPKIKLTFIGAGKDEFNTDIFAGFDVDSLSTEIEAAIDLAKEDISPKSIEINLLGANMFSYSINVEETYPGKLLLKVKDKISELMPSISQDSIIVSANQYEVRINSEGRRELLDHSGEWINKEES

SEQ ID NO: 266 - protein, 558 aa, Artificial Sequence
  Synthetic amino acid sequence
GSSHHHHHHENLYFQGSLVNRKQLEKMANVRFRTQEDEYVAILDALEEYHNMSENTVVEKYLKLKDINSLTDIYIDTYKKSGRNKALKKFKEYLVTEVLELKNNNLTPVEKNLHFVWIGGQINDTAINYINQWKDVNSDYNVNVFYDSNAFLINTLKKTVVESAINDTLESFRENLNDPRFDYNKFFRKRMEIIYDKQKNFINYYKAQREENPELIIDDIVKTYLSNEYSKEIDELNTYIEESLNKITQNSGNDVRNFEEFKNGESFNLYEQELVERWNLAAASAILAISALKEIGGMALAVAMLPGIQPDLFESIEKPSSVTVDFWEMTKLEAIMKYKEYIPEYTSEHFDMLDEEVQSSFESVLASKSDKSEIFSSLGDMEASPLEVKIAFNSKGIINQGLISVKDSYCSNLIVKQIENRYKILNNSLNPAISEDNDFNTTTNTFIDSIMAEANADNGRFMMELGKYLRVGFFPDVKTTINLSGPEAYAAAYQDLLMFKEGSMNIHLIEADLRNFEISKTNISQSTEQEMASLWSFDDARAKAQFEEYKRNYFEGSL

SEQ ID NO: 267 - protein, 532 aa, Artificial Sequence
  Synthetic amino acid sequence
GSSHHHHHHENLYFQGITGFVTVGDDKYYFNPINGGAASIGETIIDDKNYYFNQSGVLQTGVFSTEDGFKYFAPANTLDENLEGEAIDFTGKLIIDENIYYFDDNYRGAVEWKELDGEMHYFSPETGKAFKGLNQIGDYKYYFNSDGVMQKGFVSINDNKHYFDDSGVMKVGYTEIDGKHFYFAENGEMQIGVFNTEDGFKYFAHHNEDLGNEEGEEISYSGILNFNNKIYYFDDSFTAVVGWKDLEDGSKYYFDEDTAEAYIGLSLINDGQYYFNDDGIMQVGFVTINDKVFYFSDSGIIESGVQNIDDNYFYIDDNGIVQIGVFDTSDGYKYFAPANTVNDNIYGQAVEYSGLVRVGEDVYYFGETYTIETGWIYDMENESDKYYFNPETKKACKGINLIDDIKYYFDEKGIMRTGLISFENNNYYFNENGEMQFGYINIEDKMFYFGEDGVMQIGVFNTPDGFKYFAHQNTLDENFEGESINYTGWLDLDEKRYYFTDEYIAATGSVIIDGEEYYFDPDTAQLVISELE

SEQ ID NO: 268 - protein, 228 aa, Artificial Sequence
  Synthetic amino acid sequence
GSSHHHHHHENLYFQGVQIGVFDTSDGYKYFAPANTVNDNIYGQAVEYSGLVRVGEDVYYFGETYTIETGWIYDMENESDKYYFNPETKKACKGINLIDDIKYYFDEKGIMRTGLISFENNNYYFNENGEMQFGYINIEDKMFYFGEDGVMQIGVFNTPDGFKYFAHQNTLDENFEGESINYTGWLDLDEKRYYFTDEYIAATGSVIIDGEEYYFDPDTAQLVISELE

SEQ ID NO: 269 - protein, 304 aa, Artificial Sequence
  Synthetic amino acid sequence
GSSHHHHHHENLYFQGYSGILNFNNKIYYFDDSFTAVVGWKDLEDGSKYYFDEDTAEAYIGLSLINDGQYYFNDDGIMQVGFVTINDKVFYFSDSGIIESGVQNIDDNYFYIDDNGIVQIGVFDTSDGYKYFAPANTVNDNIYGQAVEYSGLVRVGEDVYYFGETYTIETGWIYDMENESDKYYFNPETKKACKGINLIDDIKYYFDEKGIMRTGLISFENNNYYFNENGEMQFGYINIEDKMFYFGEDGVMQIGVFNTPDGFKYFAHQNTLDENFEGESINYTGWLDLDEKRYYFTDEYIAAT

SEQ ID NO: 270 - protein, 360 aa, Artificial Sequence
  Synthetic amino acid sequence
RGSHHHHHHGMASMTGGQQMGRDLYDDDDKDRWGSSRITRASTGYTSINGKHFYFNTDGIMQIGVFKGPNGFEYFAPANTHNNNIEGQAILYQNKFLTLNGKKYYFGSDSKAVTGLRTIDGKKYYFNTNTAVAVTGWQTINGKKYYFNTNTSIASTGYTIISGKHFYFNTDGIMQIGVFKGPDGFEYFAPANTDANNIEGQAIRYQNRFLYLHDNIYYFGNNSKAATGWVTIDGNRYYFEPNTAMGANGYKTIDNKNFYFRNGLPQIGVFKGSNGFEYFAPANTDANNIEGQAIRYQNRFLHLLGKIYYFGNNSKAVTGWQTINGKVYYFMPDTAMAAAGGLFEIDGVIYFFGVDGVKAP

SEQ ID NO: 271 - protein, 329 aa, Artificial Sequence
  Synthetic amino acid sequence
  VARIANT (327)..(327): Xaa is any amino acid
ASTGYTSINGKHFYFNTDGIMQIGVFKGPNGFEYFAPANTHNNNIEGQAILYQNKFLTLNGKKYYFGSDSKAVTGLRTIDGKKYYFNTNTAVAVTGWQTINGKKYYFNTNTSIASTGYTIISGKHFYFNTDGIMQIGVFKGPDGFEYFAPANTDANNIEGQAIRYQNRFLYLHDNIYYFGNNSKAATGWVTIDGNRYYFEPNTAMGANGYKTIDNKNFYFRNGLPQIGVFKGSNGFEYFAPANTDANNIEGQAIRYQNRFLHLLGKIYYFGNNSKAVTGWQTINGKVYYFMPDTAMAAAGGLFEIDGVIYFFGVDGVKAPTESTCRXQA

SEQ ID NO: 272 - protein, 369 aa, Artificial sequence
  Synthetic amino acid sequence
  VARIANT (367)..(367): Xaa is any amino acid.
  VARIANT (368)..(368): Xaa is any amino acid.
RGSHHHHHHGMASMTGGQQMGRDLYDDDDKDRWGSSRITRASTGYTSINGKHFYFNTDGIMQIGVFKGPNGFEYFAPANTHNNNIEGQAILYQNKFLTLNGKKYYFGSDSKAVTGLRTIDGKKYYFNTNTAVAVTGWQTINGKKYYFNTNTSIASTGYTIISGKHFYFNTDGIMQIGVFKGPDGFEYFAPANTDANNIEGQAIRYQNRFLYLHDNIYYFGNNSKAATGWVTIDGNRYYFEPNTAMGANGYKTIDNKNFYFRNGLPQIGVFKGSNGFEYFAPANTDANNIEGQAIRYQNRFLHLLGKIYYFGNNSKAVTGWQTINGKVYYFMPDTAMAAAGGLFEIDGVIYFFGVDGVKAPTESTCRXQA

SEQ ID NO: 273 - protein, 360 aa, Artificial Sequence
  Synthetic amino acid sequence
RGSHHHHHHGMASMTGGQQMGRDLYDDDDKDRWGSSRITRASTGYTSINGKHFYFNTDGIMQIGVFKGPNGFEYFAPANTDANNIEGQAILYQNKFLTLNGKKYYFGSDSKAVTGLRTIDGKKYYFNTNTAVAVTGWQTINGKKYYFNTNTSIASTGYTIISGKHFYFNTDGIMQIGVFKGPDGFEYFAPANTDANNIEGQAIRYQNRFLYLHDNIYYFGNNSKAATGWVTIDGNRYYFEPNTAMGANGYKTIDNKNFYFRNGLPQIGVFKGSNGFEYFAPANTDANNIEGQAIRYQNRFLHLLGKIYYFGNNSKAVTGWQTINGKVYYFMPDTAMAAAGGLFEIDGVIYFFGVDGVKAP

SEQ ID NO: 274 - protein, 329 aa, Artificial Sequence
  Synthetic amino acid sequence
  VARIANT (327)..(327): Xaa is any amino acid.
ASTGYTSINGKHFYFNTDGIMQIGVFKGPNGFEYFAPANTDANNIEGQAILYQNKFLTLNGKKYYFGSDSKAVTGLRTIDGKKYYFNTNTAVAVTGWQTINGKKYYFNTNTSIASTGYTIISGKHFYFNTDGIMQIGVFKGPDGFEYFAPANTDANNIEGQAIRYQNRFLYLHDNIYYFGNNSKAATGWVTIDGNRYYFEPNTAMGANGYKTIDNKNFYFRNGLPQIGVFKGSNGFEYFAPANTDANNIEGQAIRYQNRFLHLLGKIYYFGNNSKAVTGWQTINGKVYYFMPDTAMAAAGGLFEIDGVIYFFGVDGVKAPTESTCRXQA

SEQ ID NO: 275 - protein, 369 aa, Artificial Sequence
  Synthetic amino acid sequence
  VARIANT (367)..(367): Xaa is any amino acid
RGSHHHHHHGMASMTGGQQMGRDLYDDDDKDRWGSSRITRASTGYTSINGKHFYFNTDGIMQIGVFKGPNGFEYFAPANTDANNIEGQAILYQNKFLTLNGKKYYFGSDSKAVTGLRTIDGKKYYFNTNTAVAVTGWQTINGKKYYFNTNTSIASTGYTIISGKHFYFNTDGIMQIGVFKGPDGFEYFAPANTDANNIEGQAIRYQNRFLYLHDNIYYFGNNSKAATGWVTIDGNRYYFEPNTAMGANGYKTIDNKNFYFRNGLPQIGVFKGSNGFEYFAPANTDANNIEGQAIRYQNRFLHLLGKIYYFGNNSKAVTGWQTINGKVYYFMPDTAMAAAGGLFEIDGVIYFFGVDGVKAPTESTCRXQA

SEQ ID NO: 276 - protein, 2710 aa, Artificial Sequence
  Synthetic amino acid sequence
MSLISKEELIKLAYSIRPRENEYKTILTNLDEYNKLTTNNNENKYLQLKKLNESIDVFMNKYKNSSRNRALSNLKKDILKEVILIKNSNTSPVEKNLHFVAIGGEVSDIALEYIKQWADINAEYNIKLWYDSEAFLVNTLKKAIVESSTTEALQLLEEEIQNPQFDNMKFYKKRMEFIYDRQKRFINYYKSQINKPTVPTIDDIIKSHLVSEYNRDETLLESYRTNSLRKINSNHGIDIRANSLFTEQELLNIYSQELLNRGNLAAASDIVRLLALKNFGGVYLDVAMLPGIHSDLFKTIPRPSSIGLDRWEMIKLEAIMKYKKYINNYTSENFDKLDQQLKDNFKLIIESKSEKSEIFSKLENLNVSDLEIKIAFALGSVINQALISKQGSYLTNLVIEQVKNRYQFLNQHLNPAIESDNNFTDTTKIFHDSLFNSATAENSMFLTKIAPYLQVGFMPEARSTISLSGPGAYASAYYDFINLQENTIEKTLKASDLIEFKFPENNLSQLTEQQINSLASFDQASAKYQFEKYVRDYTGGSLSEDNGVDFNKNTALDKNYLLNNKIPSNNVEEAGSKNYVHYIIQLQGDDISYEATCNLFSKNPKNSIIIQRNMNESAKSYFLSDDGESILELNKYRIPERLKNKEKVKVTFIGHGKDEFNTSEFARLSVDSLSNEISSFLDTIKLDISPKNVEVNLLGANMFSYDFNVEETYPGKLLLSIMDKITSTLPDVNKDSITIGANQYEVRINSEGRKELLAHSGKWINKEEAIMSDLSSKEYIFFDSIDNKLKAKSKNIPGLASISEDIKTLLLDASVSPDTKFILNNLKLNIESSIGDYIYYEKLEPVKNIIHNSIDDLIDEFNLLENVSDELYELKKLNNLDEKYLISFEDISKNNSTYSVRFINKSNGESVYVETEKEIFSKYSEHITKEISTIKNSIITDVNGNLLDNIQLDHTSQVNTLNAAFFIQSLIDYSSNKDVLNDLSTSVKVQLYAQLFSTGLNTIYDSIQLVNLISNAVNDTINVLPTITEGIPIVSTILDGINLGAAIKELLDEHDPLLKKELEAKVGVLAINMSLSIAATVASIVGIGAEVTIFLLPIAGISAGIPSLVNNELILHDKATSVVNYFNHLSESKEYGPLKTEDDKILVPIDDLVISEIDFNNNSIKLGTCNILAMEGGSGHTVTGNIDHFFSSPYISSHIPSLSVYSAIGIKTENLDFSKKIMMLPNAPSRVFWWETGAVPGLRSLENNGTKLLDSIRDLYPGKFYWRFYAFFDYAITTLKPVYEDTNTKIKLDKDTRNFIMPTITTDEIRNKLSYSFDGAGGTYSLLLSSYPISMNINLSKDDLWIFNIDNEVREISIENGTIKKGNLIEDVLSKIDINKNKLIIGNQTIDFSGDIDNKDRYIFLTCELDDKISLIIEINLVAKSYSLLLSGDKNYLISNLSNTIEKINTLGLDSKNIAYNYTDESNNKYFGAISKTSQKSIIHYKKDSKNILEFYNGSTLEFNSKDFIAEDINVFMKDDINTITGKYYVDNNTDKSIDFSISLVSKNQVKVNGLYLNESVYSSYLDFVKNSDGHHNTSNFMNLFLNNISFWKLFGFENINFVIDKYFTLVGKTNLGYVEFICDNNKNIDIYFGEWKTSSSKSTIFSGNGRNVVVEPIYNPDTGEDISTSLDFSYEPLYGIDRYINKVLIAPDLYTSLININTNYYSNEYYPEIIVLNPNTFHKKVNINLDSSSFEYKWSTEGSDFILVRYLEESNKKILQKIRIKGILSNTQSFNKMSIDFKDIKKLSLGYIMSNFKSFNSENELDRDHLGFKIIDNKTYYYDEDSKLVKGLININNSLFYFDPIESNLVTGWQTINGKKYYFDINTGAASTSYKIINGKHFYFNNNGVMQLGVFKGPDGFEYFAPANTQNNNIEGQAIVYQSKFLTLNGKKYYFDNDSKAVTGWRIINNEKYYFNPNNAIAAVGLQVIDNNKYYFNPDTAIISKGWQTVNGSRYYFDTDTAIAFNGYKTIDGKHFYFDSDCVVKIGVFSGSNGFEYFAPANTYNNNIEGQAIVYQSKFLTLNGKKYYFDNNSKAVTGWQTIDSKKYYFNTNTAEAATGWQTIDGKKYYFNTNTAEAATGWQTIDGKKYYFNTNTSIASTGYTIINGKYFYFNTDGIMQIGVFKVPNGFEYFAPANTHNNNIEGQAILYQNKFLTLNGKKYYFGSDSKAITGWQTIDGKKYYFNPNNAIAATHLCTINNDKYYFSYDGILQNGYITIERNNFYFDANNESKMVTGVFKGPNGFEYFAPANTHNNNIEGQAIVYQNKFLTLNGKKYYFDNDSKAVTGWQTIDSKKYYFNLNTAVAVTGWQTIDGEKYYFNLNTAEAATGWQTIDGKRYYFNTNTYIASTGYTIINGKHFYFNTDGIMQIGVFKGPDGFEYFAPANTHNNNIEGQAILYQNKFLTLNGKKYYFGSDSKAVTGLRTIDGKKYYFNTNTAVAVTGWQTINGKKYYFNTNTYIASTGYTIISGKHFYFNTDGIMQIGVFKGPDGFEYFAPANTDANNIEGQAIRYQNRFLYLHDNIYYFGNDSKAATGWATIDGNRYYFEPNTAMGANGYKTIDNKNFYFRNGLPQIGVFKGPNGFEYFAPANTDANNIDGQAIRYQNRFLHLLGKIYYFGNNSKAVTGWQTINSKVYYFMPDTAMAAAGGLFEIDGVIYFFGVDGVKAPGIYG

SEQ ID NO: 277 - protein, 2710 aa, Artificial Sequence
  Synthetic amino acid sequence
MSLISKEELIKLAYSIRPRENEYKTILTNLDEYNKLTTNNNENKYLQLKKLNESIDVFMNKYKTSSRNRALSNLKKDILKEVILIKNSNTSPVEKNLHFVAIGGEVSDIALEYIKQWADINAEYNIKLWYDSEAFLVNTLKKAIVESSTTEALQLLEEEIQNPQFDNMKFYKKRMEFIYDRQKRFINYYKSQINKPTVPTIDDIIKSHLVSEYNRDETVLESYRTNSLRKINSNHGIDIRANSLFTEQELLNIYSQELLNRGNLAAASDIVRLLALKNFGGVYLDVAMLPGIHSDLFKTISRPSSIGLDRWEMIKLEAIMKYKKYINNYTSENFDKLDQQLKDNFKLIIESKSEKSEIFSKLENLNVSDLEIKIAFALGSVINQALISKQGSYLTNLVIEQVKNRYQFLNQHLNPAIESDNNFTDTTKIFHDSLFNSATAENSMFLTKIAPYLQVGFMPEARSTISLSGPGAYASAYYDFINLQENTIEKTLKASDLIEFKFPENNLSQLTEQQINSLASFDQASAKYQFEKYVRDYTGGSLSEDNGVDFNKNTALDKNYLLNNKIPSNNVEEAGSKNYVHYIIQLQGDDISYEATCNLFSKNPKNSIIIQRNMNESAKSYFLSDDGESILELNKYRIPERLKNKEKVKVTFIGHGKDEFNTSEFARLSVDSLSNEISSFLDTIKLDISPKNVEVNLLGANMFSYDFNVEETYPGKLLLSIMDKITSTLPDVNKNSITIGANQYEVRINSEGRKELLAHSGKWINKEEAIMSDLSSKEYIFFDSIDNKLKAKSKNIPGLASISEDIKTLLLDASVSPDTKFILNNLKLNIESSIGDYIYYEKLEPVKNIIHNSIDDLIDEFNLLENVSDELYELKKLNNLDEKYLISFEDISKNNSTYSVRFINKSNGESVYVETEKEIFSKYSEHITKEISTIKNSIITDVNGNLLDNIQLDHTSQVNTLNAAFFIQSLIDYSSNKDVLNDLSTSVKVQLYAQLFSTGLNTIYDSIQLVNLISNAVNDTINVLPTITEGIPIVSTILDGINLGAAIKELLDEHDPLLKKELEAKVGVLAINMSLSIAATVASIVGIGAEVTIFLLPIAGISAGIPSLVNNELILHDKATSVVNYFNHLSESKKYGPLKTEDDKILVPIDDLVISEIDFNNNSIKLGTCNILAMEGGSGHTVTGNIDHFFSSPSISSHIPSLSIYSAIGIETENLDFSKKIMMLPNAPSRVFWWETGAVPGLRSLENDGTRLLDSIRDLYPGKFYWRFYAFFDYAITTLKPVYEDTNIKIKLDKDTRNFIMPTITTNEIRNKLSYSFDGAGGTYSLLLSSYPISTNINLSKDDLWIFNIDNEVREISIENGTIKKGKLIKDVLSKIDINKNKLIIGNQTIDFSGDIDNKDRYIFLTCELDDKISLIIEINLVAKSYSLLLSGDKNYLISNLSNTIEKINTLGLDSKNIAYNYTDESNNKYFGAISKTSQKSIIHYKKDSKNILEFYNDSTLEFNSKDFIAEDINVFMKDDINTITGKYYVDNNTDKSIDFSISLVSKNQVKVNGLYLNESVYSSYLDFVKNSDGHHNTSNFMNLFLDNISFWKLFGFENINFVIDKYFTLVGKTNLGYVEFICDNNKNIDIYFGEWKTSSSKSTIFSGNGRNVVVEPIYNPDTGEDISTSLDFSYEPLYGIDRYINKVLIAPDLYTSLININTNYYSNEYYPEIIVLNPNTFHKKVNINLDSSSFEYKWSTEGSDFILVRYLEESNKKILQKIRIKGILSNTQSFNKMSIDFKDIKKLSLGYIMSNFKSFNSENELDRDHLGFKIIDNKTYYYDEDSKLVKGLININNSLFYFDPIEFNLVTGWQTINGKKYYFDINTGAALTSYKIINGKHFYFNNDGVMQLGVFKGPDGFEYFAPANTQNNNIEGQAIVYQSKFLTLNGKKYYFDNDSKAVTGWRIINNEKYYFNPNNAIAAVGLQVIDNNKYYFNPDTAIISKGWQTVNGSRYYFDTDTAIAFNGYKTIDGKHFYFDSDCVVKIGVFSTSNGFEYFAPANTYNNNIEGQAIVYQSKFLTLNGKKYYFDNNSKAVTGWQTIDSKKYYFNTNTAEAATGWQTIDGKKYYFNTNTAEAATGWQTIDGKKYYFNTNTAIASTGYTIINGKHFYFNTDGIMQIGVFKGPNGFEYFAPANTDANNIEGQAILYQNEFLTLNGKKYYFGSDSKAVTGWRIINNKKYYFNPNNAIAAIHLCTINNDKYYFSYDGILQNGYITIERNNFYFDANNESKMVTGVFKGPNGFEYFAPANTHNNNIEGQAIVYQNKFLTLNGKKYYFDNDSKAVTGWQTIDGKKYYFNLNTAEAATGWQTIDGKKYYFNLNTAEAATGWQTIDGKKYYFNTNTFIASTGYTSINGKHFYFNTDGIMQIGVFKGPNGFEYFAPANTHNNNIEGQAILYQNKFLTLNGKKYYFGSDSKAVTGLRTIDGKKYYFNTNTAVAVTGWQTINGKKYYFNTNTSIASTGYTIISGKHFYFNTDGIMQIGVFKGPDGFEYFAPANTDANNIEGQAIRYQNRFLYLHDNIYYFGNNSKAATGWVTIDGNRYYFEPNTAMGANGYKTIDNKNFYFRNGLPQIGVFKGSNGFEYFAPANTDANNIEGQAIRYQNRFLHLLGKIYYFGNNSKAVTGWQTINGKVYYFMPDTAMAAAGGLFEIDGVIYFFGVDGVKAPGIYG

SEQ ID NO: 278 - protein, 2710 aa, Artificial Sequence; identical to SEQ ID NO: 276
  Synthetic amino acid sequence

SEQ ID NO: 279 - protein, 2710 aa, Artificial Sequence; identical to SEQ ID NO: 277
  Synthetic amino acid sequence

SEQ ID NO: 280 - protein, 2710 aa, Artificial Sequence; identical to SEQ ID NO: 277
  Synthetic amino acid sequence

SEQ ID NO: 281 - protein, 2710 aa, Artificial Sequence
  Synthetic amino acid sequence
MSLISKEELIKLAYSIRPRENEYKTILTNLDEYNKLTTNNNENKYLQLKKLNESIDVFMNKYKTSSRNRALSNLKKDILKEVILIKNSNTSPVEKNLHFVAIGGEVSDIALEYIKQWADINAEYNIKLWYDSEAFLVNTLKKAIVESSTTEALQLLEEEIQNPQFDNMKFYKKRMEFIYDRQKRFINYYKSQINKPTVPTIDDIIKSHLVSEYNRDETVLESYRTNSLRKINSNHGIDIRANSLFTEQELLNIYSQELLNRGNLAAASDIVRLLALKNFGGVYLDVAMLPGIHSDLFKTISRPSSIGLDRWEMIKLEAIMKYKKYINNYTSENFDKLDQQLKDNFKLIIESKSEKSEIFSKLENLNVSDLEIKIAFALGSVINQALISKQGSYLTNLVIEQVKNRYQFLNQHLNPAIESDNNFTDTTKIFHDSLFNSATAENSMFLTKIAPYLQVGFMPEARSTISLSGPGAYASAYYDFINLQENTIEKTLKASDLIEFKFPENNLSQLTEQQINSLASFDQASAKYQFEKYVRDYTGGSLSEDNGVDFNKNTALDKNYLLNNKIPSNNVEEAGSKNYVHYIIQLQGDDISYEATCNLFSKNPKNSIIIQRNMNESAKSYFLSDDGESILELNKYRIPERLKNKEKVKVTFIGHGKDEFNTSEFARLSVDSLSNEISSFLDTIKLDISPKNVEVNLLGANMFSYDFNVEETYPGKLLLSIMDKITSTLPDVNKNSITIGANQYEVRINSEGRKELLAHSGKWINKEEAIMSDLSSKEYIFFDSIDNKLKAKSKNIPGLASISEDIKTLLLDASVSPDTKFILNNLKLNIESSIGDYIYYEKLEPVKNIIHNSIDDLIDEFNLLENVSDELYELKKLNNLDEKYLISFEDISKNNSTYSVRFINKSNGESVYVETEKEIFSKYSEHITKEISTIKNSIITDVNGNLLDNIQLDHTSQVNTLNAAFFIQSLIDYSSNKDVLNDLSTSVKVQLYAQLFSTGLNTIYDSIQLVNLISNAVNDTINVLPTITEGIPIVSTILDGINLGAAIKELLDEHDPLLKKELEAKVGVLAINMSLSIAATVASIVGIGAEVTIFLLPIAGISAGIPSLVNNELILHDKATSVVNYFNHLSESKKYGPLKTEDDKILVPIDDLVISEIDFNNNSIKLGTCNILAMEGGSGHTVTGNIDHFFSSPSISSHIPSLSIYSAIGIETENLDFSKKIMMLPNAPSRVFWWETGAVPGLRSLENDGTRLLDSIRDLYPGKFYWRFYAFFDYAITTLKPVYEDTNIKIKLDKDTRNFIMPTITTNEIRNKLSYSFDGAGGTYSLLLSSYPISTNINLSKDDLWIFNIDNEVREISIENGTIKKGKLIKDVLSKIDINKNKLIIGNQTIDFSGDIDNKDRYIFLTCELDDKISLIIEINLVAKSYSLLLSGDKNYLISNLSNTIEKINTLGLDSKNIAYNYTDESNNKYFGAISKTSQKSIIHYKKDSKNILEFYNDSTLEFNSKDFIAEDINVFMKDDVNTITGKYYVDNNTDKSIDFSISLVSKNQVKVNGLYLNESVYSSYLDFVKNSDGHHNTSNFMNLFLDNISFWKLFGFENINFVIDKYFTLVGKTNLGYVEFICDNNKNIDIYFGEWKTSSSKSTIFSGNGRNVVVEPIYNPDTGEDISTSLDFSYEPLYGIDRYINKVLIAPDLYTSLININTNYYSNEYYPEIIVLNPNTFHKKVNINLDSSSFEYKWSTEGSDFILVRYLEESNKKILQKIRIKGILSNTQSFNKMSIDFKDIKKLSLGYIMSNFKSFNSENELDRDHLGFKIIDNKTYYYDEDSKLVKGLININNSLFYFDPIEFNLVTGWQTINGKKYYFDINTGAALTSYKIINGKHFYFNNDGVMQLGVFKGPDGFEYFAPANTQNNNIEGQAIVYQSKFLTLNGKKYYFDNNSKAVTGWRIINNEKYYFNPNNAIAAVGLQVIDNNKYYFNPDTAIISKGWQTVNGSRYYFDTDTAIAFNGYKTIDGKHFYFDSDCVVKIGVFSTSNGFEYFAPANTYNNNIEGQAIVYQSKFLTLNGKKYYFDNNSKAVTGWQTIDSKKYYFNTNTAEAATGWQTIDGKKYYFNTNTAEAATGWQTIDGKKYYFNTNTAIASTGYTIINGKHFYFNTDGIMQIGVFKGPNGFEYFAPANTDANNIEGQAILYQNEFLTLNGKKYYFGSDSKAVTGWRIINNKKYYFNPNNAIAAIHLCTINNDKYYFSYDGILQNGYITIERNNFYFDANNESKMVTGVFKGPNGFEYFAPANTHNNNIEGQAIVYQNKFLTLNGKKYYFDNDSKAVTGWQTIDGKKYYFNLNTAEAATGWQTIDGKKYYFNLNTAEAATGWQTIDGKKYYFNTNTFIASTGYTSINGKHFYFNTDGIMQIGVFKGPNGFEYFAPANTDANNIEGQAILYQNKFLTLNGKKYYFGSDSKAVTGLRTIDGKKYYFNTNTAVAVTGWQTINGKKYYFNTNTSIASTGYTIISGKHFYFNTDGIMQIGVFKGPDGFEYFAPANTDANNIEGQAIRYQNRFLYLHDNIYYFGNNSKAATGWVTIDGNRYYFEPNTAMGANGYKTIDNKNFYFRNGLPQIGVFKGSNGFEYFAPANTDANNIEGQAIRYQNRFLHLLGKIYYFGNNSKAVTGWQTINGKVYYFMPDTAMAAAGGLFEIDGVIYFFGVDGVKAPGIYG

SEQ ID NO: 282 - protein, 2710 aa, Artificial Sequence
  Synthetic amino acid sequence
MSLISKEELIKLAYSIRPRENEYKTILTNLDEYNKLTTNNNENKYLQLKKLNESIDVFMNKYKNSSRNRALSNLKKDILKEVILIKNSNTSPVEKNLHFVAIGGEVSDIALEYIKQWADINAEYNIKLWYDSEAFLVNTLKKAIVESSTTEALQLLEEEIQNPQFDNMKFYKKRMEFIYDRQKRFVNYYKSQINKPTVPTIDDIIKSHLVSEYNRDETLLESYRTNSLRKINSNHGIDIRANSLFTEQELLNIYSQELLNRGNLAAASDIVRLLALKNFGGVYLDVAMLPGIHSDLFKTISRPSSIGLDRWEMIKLEAIMKYKKYINNYTSENFDKLDQQLKDNFKLIIESKSEKSEIFSKLENLNVSDLEIKIAFALGSVINQALISKQGSYLTNLVIEQVKNRYQFLNQHLNPAIESDNNFTDTTKIFHDSLFNSATAENSMFLTKIAPYLQVGFMPEARSTISLSGPGAYASAYYDFINLQENTIEKTLKASDLIEFKFPENNLSQLTEQQINSLASFDQASAKYQFEKYVRDYTGGSLSEDNEVDFNKNTALDKNYLLNNKIPSNNVEEAGSKNYVHYIIQLQGDDISYEATCNLFSKNPKNSIIIQRNMNESAKSYFLSDDGESILELNKYRIPERLKNKEKVKVTFIGHGKDEFNTSEFARLSVDSLSNEISSFLDTIKLDISPKNVEVNLLGANMFSYDFNVEETYPGKLLLSIMDKITSTLPDVNKDSITIGANQYEVRINSEGRKELLAHSGKWINKEEAIMSDLSSKEYIFFDSIDNKLKAKSKNIPGLASISEDIKTLLLDTSVSPDTKFILNNLKLNIESSVGDYIYYEKLEPVKNIIHNSIDDLIDEFNLLENVSDELYELKKLNNLDEKYLISFEDISKNNSTYSVRFINKSNGESVYVETEKEIFSKYSEHITKEISTIKNSIITDVNGNLLDNIQLDHTSQVNTLNAAFFIQSLIDYSSNKDLLNDLSTSVKVQLYAQLFSTGLNTIYDSIQLVNLISNAVNDTINVLPTITEGIPIVSTILDGINLGAAIKELLDEHDPLLKKELEAKVGVLAINMSLSIAATVASIVGIGAEVTIFLLPIAGISAGIPSLVNNELILHDKATSVVNYFNHLSESKEYGPLKTEDDKILVPIDDLVISEIDFNNNAIKLGTCNILAMEGGSGHTVTGNIDHFFSSPSISSHIPSLSIYSAIGIKTENLDFSKKIMMLPNAPSRVFWWETGAVPGLRSLENNGTKLLDSIRDLYPGKFYWRFYAFFDYAITTLKPVYEDTNIKIKLDKDTRNFIMPTITTNEIRNKLSYSFDGAGGTYSLLLSSYPISTNINLSKDDLWIFNIDNEVREISIENGTIKKGKLIKDVLSKIDINKNKLIIGNQTIDFSGDIDNKDRYIFLTCELDDKISLIIEINLVAKSYSLLLSGDKNYLISNLSNTIEKINTLGLDSKNIAYNYTDESNNKYFGAISKTSQKSIIHYKKDSKNILEFYNGSTLEFNSKDFIAEDINVFMKDDINTITGKYYVDNNTDKSIDFSISLVSKNQAKVNGLYLNESVYSSYLDFVKNADGHHNTSNFMNLFLDNISFWKLFGFENINFVVDKYFTLVGKTNLGYVEFICDNNKNIDIYFGEWKTSSSKSTIFSGNGRNVVVEPIYNPDTGEDISTSLDFSYEPLYGIDRYINKVLIAPDLYTSLININTNYYSNEYYPEIIVLNPNTFHKKVNINLDSSSFEYKWSTEGSDFILVRYLEESNKKILQKIRIKGILSNTQSFNKMSIDFKDIKKLSLVYIMSNFKSFNSENELDRDHLGFKIIDNKTYYYDEASKLVKGLININNSLFYFDPIESNLVTGWQTINGKKYYFDINTGAALTSYKIINGKHFYFNNNGVMQLGVFKGPDRFEYFAPANTQNNNIEGQAIVYQSKFLTLNGKKYYFDNDSKAVTGWRIINNEKYYFNPNNAIAAVGLQVIDNNKYYFNPDTAIISKGWQTVNGSRYYFDTDTAIAFNGYKTIDGKHFYFDSDCVVKIGVFSGSNGFEYFAPANTYNNNIEGQAIVYQSKFLTLNGKKYYFDNNSKAVTGWQTIDSKKYYFNTNTAEAATGWQTIDGKKYYFNTNTAEVATGWQTIDGKKYYFNTNTSIASTGYTIINGKHFYFNTDGIMQIGVFKGPDGFEYFAPANTDANNIEGQAILYQNKFLTLNGKKYYFASDSKAVTGWRIINNKKYYFNPNNAIAATHLYTINNDKYYFSYDGILQNGYITIERNNFYFDANNESKMVTGVFKGPNGFEYFAPANTHNNNIEGQAIVYQNKFLTLNGKKYYFDNDSKAVTGWQTIDGKKYYFNLNTAVAVTGWQTIDGKKYYFNTNTAETATGWQTIDGKKYYFNTNTSIASTGYTIINGKHFYFNTDGIMQIGVFKGPDGFEYFAPANTDANNIEGQAILYQNKFLTLNGKKYYFASDSKAVTGLRTIDGKKYYFNTNTAEAATGWQTIDGKKYYFNTNTSIASTGYTIINDKHFYFNTDGIMQIGVFKGPDGFEYFAPANTDANNIEGQAIRYQNRFLYLHDNIYYFGNNSKAATGWVTIDGRRYYFEPNTAIGANGYKIIDNKNFYFRNGLPQIGVFKGPNGFEYFAPANTDANNIDGQAIRYQNRFLHLLGNIYYFGNNSKAVTGWQTINGNMYYFMPDTAMAAAGGLFEIDGVIYFFGVDGVKAPGIYG

SEQ ID NO: 283 - protein, 2710 aa, Artificial Sequence; identical to SEQ ID NO: 281
  Synthetic amino acid sequence

SEQ ID NO: 284 - protein, 2710 aa, Artificial Sequence
  Synthetic amino acid sequence
MSLISKEELIKLAYSIRPRENEYKTILTNLDEYNKLTTNNNENKYLQLKKLNESIDVFMNKYKNSSRNRALSNLKKDILKEVILIKNSNTSPVEKNLHFVAIGGEVSDIALEYIKQWADINAEYNIKLWYDSEAFLVNTLKKAIVESSTTEALQLLEEEIQNPQFDNMKFYKKRMEFIYDRQKRFVNYYKSQINKPTVPTIDDIIKSHLVSEYNRDETLLESYRTNSLRKINSNHGIDIRANSLFTEQELLNIYSQELLNRGNLAAASDIVRLLALKNFGGVYLDVAMLPGIHSDLFKTISRPSSIGLDRWEMIKLEAIMKYKKYINNYTSENFDKLDQQLKDNFKLIIESKSEKSEIFSKLENLNVSDLEIKIAFALGSVINQALISKQGSYLTNLVIEQVKNRYQFLNQHLNPAIESDNNFTDTTKIFHDSLFNSATAENSMFLTKIAPYLQVGFMPEARSTISLSGPGAYASAYYDFINLQENTIEKTLKASDLIEFKFPENNLSQLTEQQINSLASFDQASAKYQFEKYVRDYTGGSLSEDNEVDFNKNTALDKNYLLNNKIPSNNVEEAGSKNYVHYIIQLQGDDISYEATCNLFSKNPKNSIIIQRNMNESAKSYFLSDDGESILELNKYRIPERLKNKEKVKVTFIGHGKDEFNTSEFARLSVDSLSNEISSFLDTIKLDISPKNVEVNLLGANMFSYDFNVEETYPGKLLLSIMDKITSTLPDVNKDSITIGANQYEVRINSEGRKELLAHSGKWINKEEAIMSDLSSKEYIFFDSIDNKLKAKSKNIPGLASISEDIKTLLLDTSVSPDTKFILNNLKLNIESSVGDYIYYEKLEPVKNIIHNSIDDLIDEFNLLENVSDELYELKKLNNLDEKYLISFEDISKNNSTYSVRFINKSNGESVYVETEKEIFSKYSEHITKEISTIKNSIITDVNGNLLDNIQLDHTSQVNTLNAAFFIQSLIDYSSNKDLLNDLSTSVKVQLYAQLFSTGLNTIYDSIQLVNLISNAVNDTINVLPTITEGIPIVSTILDGINLGAAIKELLDEHDPLLKKELEAKVGVLAINMSLSIAATVASIVGIGAEVTIFLLPIAGISAGIPSLVNNELILHDKATSVVNYFNHLSESKEYGPLKTEDDKILVPIDDLVISEIDFNNNAIKLGTCNILAMEGGSGHTVTGNIDHFFSSPSISSHIPSLSIYSAIGIKTENLDFSKKIMMLPNAPSRVFWWETGAVPGLRSLENNGTKLLDSIRDLYPGKFYWRFYAFFDYAITTLKPVYEDTNIKIKLDKDTRNFIMPTITTNEIRNKLSYSFDGAGGTYSLLLSSYPISTNINLSKDDLWIFNIDNEVREISIENGTIKKGKLIKDVLSKIDINKNKLIIGNQTIDFSGDIDNKDRYIFLTCELDDKISLIIEINLVAKSYSLLLSGDKNYLISNLSNTIEKINTLGLDSKNIAYNYTDESNNKYFGAISKTSQKSIIHYKKDSKNILEFYNGSTLEFNSKDFIAEDINVFMKDDINTITGKYYVDNNTDKSIDFSISLVSKNQAKVNGLYLNESVYSSYLDFVKNADGHHNTSNFMNLFLDNISFWKLFGFENINFVVDKYFTLVGKTNLGYVEFICDNNKNIDIYFGEWKTSSSKSTIFSGNGRNVVVEPIYNPDTGEDISTSLDFSYEPLYGIDRYINKVLIAPDLYTSLININTNYYSNEYYPEIIVLNPNTFHKKVNINLDSSSFEYKWSTEGSDFILVRYLEESNKKILQKIRIKGILSNTQSFNKMSIDFKDIKKLSLVYIMSNFKSFNSENELDRDHLGFKIIDNKTYYYDEASKLVKGLININNSLFYFDPIESNLVTGWQTINGKKYYFDINTGAALTSYKIINGKHFYFNNNGVMQLGVFKGPDRFEYFAPANTQNNNIEGQAIVYQSKFLTLNGKKYYFDNDSKAVTGWRIINNEKYYFNPNNAIAAVGLQVIDNNKYYFNPDTAIISKGWQTVNGSRYYFDTDTAIAFNGYKTIDGKHFYFDSDCVVKIGVFSGSNGFEYFAPANTYNNNIEGQAIVYQSKFLTLNGKKYYFDNNSKAVTGWQTIDSKKYYFNTNTAEAATGWQTIDGKKYYFNTNTAEVATGWQTIDGKKYYFNTNTSIASTGYTIINGKHFYFNTDGIMQIGVFKGPDGFEYFAPANTDANNIEGQAILYQNKFLTLNGKKYYFASDSKAVTGWRIINNKKYYFNPNNAIAATHLYTINNDKYYFSYDGILQNGYITIERNNFYFDANNESKMVTGVFKGPNGFEYFAPANTHNNNIEGQAIVYQNKFLTLNGKKYYFDNDSKAVTGWQTIDGKKYYFNLNTAVAVTGWQTIDGKKYYFNTNTAEAATGWQTIDGKKYYFNTNTSIASTGYTIINGKHFYFNTDGIMQIGVFKGPDGFEYFAPANTDANNIEGQAILYQNKFLTLNGKKYYFASDSKAVTGLRTIDGKKYYFNTNTAEAATGWQTIDGKKYYFNTNTSIASTGYTIINDKHFYFNTDGIMQIGVFKGPDGFEYFAPANTDANNIEGQAIRYQNRFLYLHDNIYYFGNNSKAATGWVTIDGRRYYFEPNTAIGANGYKIIDNKNFYFRNGLPQIGVFKGPNGFEYFAPANTDANNIDGQAIRYQNRFLHLLGNIYYFGNNSKAVTGWQTINGNMYYFMPDTAMAAAGGLFEIDGVIYFFGVDGVKAPGIYG

SEQ ID NO: 285 - protein, 2709 aa, Artificial Sequence
  Synthetic amino acid sequence
SLISKEELIKLAYSIRPRENEYKTILTNLDEYNKLTTNNNENKYLQLKKLNESIDVFMNKYKNSSRNRALSNLKKDILKEVILIKNSNTSPVEKNLHFVAIGGEVSDIALEYIKQWADINAEYNIKLWYDSEAFLVNTLKKAIVESSTTEALQLLEEEIQNPQFDNMKFYKKRMEFIYDRQKRFINYYKSQINKPTVPTIDDIIKSHLVSEYNRDETLLESYRTNSLRKINSNHGIDIRANSLFTEQELLNIYSQELLNRGNLAAASDIVRLLALKNFGGVYLDVAMLPGIHSDLFKTIPRPSSIGLDRWEMIKLEAIMKYKKYINNYTSENFDKLDQQLKDNFKLIIESKSEKSEIFSKLENLNVSDLEIKIAFALGSVINQALISKQGSYLTNLVIEQVKNRYQFLNQHLNPAIESDNNFTDTTKIFHDSLFNSATAENSMFLTKIAPYLQVGFMPEARSTISLSGPGAYASAYYDFINLQENTIEKTLKASDLIEFKFPENNLSQLTEQQINSLASFDQASAKYQFEKYVRDYTGGSLSEDNGVDFNKNTALDKNYLLNNKIPSNNVEEAGSKNYVHYIIQLQGDDISYEATCNLFSKNPKNSIIIQRNMNESAKSYFLSDDGESILELNKYRIPERLKNKEKVKVTFIGHGKDEFNTSEFARLSVDSLSNEISSFLDTIKLDISPKNVEVNLLGANMFSYDFNVEETYPGKLLLSIMDKITSTLPDVNKDSITIGANQYEVRINSEGRKELLAHSGKWINKEEAIMSDLSSKEYIFFDSIDNKLKAKSKNIPGLASISEDIKTLLLDASVSPDTKFILNNLKLNIESSIGDYIYYEKLEPVKNIIHNSIDDLIDEFNLLENVSDELYELKKLNNLDEKYLISFEDISKNNSTYSVRFINKSNGESVYVETEKEIFSKYSEHITKEISTIKNSIITDVNGNLLDNIQLDHTSQVNTLNAAFFIQSLIDYSSNKDVLNDLSTSVKVQLYAQLFSTGLNTIYDSIQLVNLISNAVNDTINVLPTITEGIPIVSTILDGINLGAAIKELLDEHDPLLKKELEAKVGVLAINMSLSIAATVASIVGIGAEVTIFLLPIAGISAGIPSLVNNELILHDKATSVVNYFNHLSESKEYGPLKTEDDKILVPIDDLVISEIDFNNNSIKLGTCNILAMEGGSGHTVTGNIDHFFSSPYISSHIPSLSVYSAIGIKTENLDFSKKIMMLPNAPSRVFWWETGAVPGLRSLENNGTKLLDSIRDLYPGKFYWRFYAFFDYAITTLKPVYEDTNTKIKLDKDTRNFIMPTITTDEIRNKLSYSFDGAGGTYSLLLSSYPISMNINLSKDDLWIFNIDNEVREISIENGTIKKGNLIEDVLSKIDINKNKLIIGNQTIDFSGDIDNKDRYIFLTCELDDKISLIIEINLVAKSYSLLLSGDKNYLISNLSNTIEKINTLGLDSKNIAYNYTDESNNKYFGAISKTSQKSIIHYKKDSKNILEFYNGSTLEFNSKDFIAEDINVFMKDDINTITGKYYVDNNTDKSIDFSISLVSKNQVKVNGLYLNESVYSSYLDFVKNSDGHHNTSNFMNLFLNNISFWKLFGFENINFVIDKYFTLVGKTNLGYVEFICDNNKNIDIYFGEWKTSSSKSTIFSGNGRNVVVEPIYNPDTGEDISTSLDFSYEPLYGIDRYINKVLIAPDLYTSLININTNYYSNEYYPEIIVLNPNTFHKKVNINLDSSSFEYKWSTEGSDFILVRYLEESNKKILQKIRIKGILSNTQSFNKMSIDFKDIKKLSLGYIMSNFKSFNSENELDRDHLGFKIIDNKTYYYDEDSKLVKGLININNSLFYFDPIESNLVTGWQTINGKKYYFDINTGAASTSYKIINGKHFYFNNNGVMQLGVFKGPDGFEYFAPANTQNNNIEGQAIVYQSKFLTLNGKKYYFDNDSKAVTGWRIINNEKYYFNPNNAIAAVGLQVIDNNKYYFNPDTAIISKGWQTVNGSRYYFDTDTAIAFNGYKTIDGKHFYFDSDCVVKIGVFSGSNGFEYFAPANTYNNNIEGQAIVYQSKFLTLNGKKYYFDNNSKAVTGWQTIDSKKYYFNTNTAEAATGWQTIDGKKYYFNTNTAEAATGWQTIDGKKYYFNTNTSIASTGYTIINGKYFYFNTDGIMQIGVFKVPNGFEYFAPANTHNNNIEGQAILYQNKFLTLNGKKYYFGSDSKAITGWQTIDGKKYYFNPNNAIAATHLCTINNDKYYFSYDGILQNGYITIERNNFYFDANNESKMVTGVFKGPNGFEYFAPANTHNNNIEGQAIVYQNKFLTLNGKKYYFDNDSKAVTGWQTIDSKKYYFNLNTAVAVTGWQTIDGEKYYFNLNTAEAATGWQTIDGKRYYFNTNTYIASTGYTIINGKHFYFNTDGIMQIGVFKGPDGFEYFAPANTHNNNIEGQAILYQNKFLTLNGKKYYFGSDSKAVTGLRTIDGKKYYFNTNTAVAVTGWQTINGKKYYFNTNTYIASTGYTIISGKHFYFNTDGIMQIGVFKGPDGFEYFAPANTDANNIEGQAIRYQNRFLYLHDNIYYFGNDSKAATGWATIDGNRYYFEPNTAMGANGYKTIDNKNFYFRNGLPQIGVFKGPNGFEYFAPANTDANNIDGQAIRYQNRFLHLLGKIYYFGNNSKAVTGWQTINSKVYYFMPDTAMAAAGGLFEIDGVIYFFGVDGVKAPGIYG

SEQ ID NO: 286 - protein, 2709 aa, Artificial Sequence
  Synthetic amino acid sequence
SLISKEELIKLAYSIRPRENEYKTILTNLDEYNKLTTNNNENKYLQLKKLNESIDVFMNKYKTSSRNRALSNLKKDILKEVILIKNSNTSPVEKNLHFVAIGGEVSDIALEYIKQWADINAEYNIKLWYDSEAFLVNTLKKAIVESSTTEALQLLEEEIQNPQFDNMKFYKKRMEFIYDRQKRFINYYKSQINKPTVPTIDDIIKSHLVSEYNRDETVLESYRTNSLRKINSNHGIDIRANSLFTEQELLNIYSQELLNRGNLAAASDIVRLLALKNFGGVYLDVAMLPGIHSDLFKTISRPSSIGLDRWEMIKLEAIMKYKKYINNYTSENFDKLDQQLKDNFKLIIESKSEKSEIFSKLENLNVSDLEIKIAFALGSVINQALISKQGSYLTNLVIEQVKNRYQFLNQHLNPAIESDNNFTDTTKIFHDSLFNSATAENSMFLTKIAPYLQVGFMPEARSTISLSGPGAYASAYYDFINLQENTIEKTLKASDLIEFKFPENNLSQLTEQQINSLASFDQASAKYQFEKYVRDYTGGSLSEDNGVDFNKNTALDKNYLLNNKIPSNNVEEAGSKNYVHYIIQLQGDDISYEATCNLFSKNPKNSIIIQRNMNESAKSYFLSDDGESILELNKYRIPERLKNKEKVKVTFIGHGKDEFNTSEFARLSVDSLSNEISSFLDTIKLDISPKNVEVNLLGANMFSYDFNVEETYPGKLLLSIMDKITSTLPDVNKNSITIGANQYEVRINSEGRKELLAHSGKWINKEEAIMSDLSSKEYIFFDSIDNKLKAKSKNIPGLASISEDIKTLLLDASVSPDTKFILNNLKLNIESSIGDYIYYEKLEPVKNIIHNSIDDLIDEFNLLENVSDELYELKKLNNLDEKYLISFEDISKNNSTYSVRFINKSNGESVYVETEKEIFSKYSEHITKEISTIKNSIITDVNGNLLDNIQLDHTSQVNTLNAAFFIQSLIDYSSNKDVLNDLSTSVKVQLYAQLFSTGLNTIYDSIQLVNLISNAVNDTINVLPTITEGIPIVSTILDGINLGAAIKELLDEHDPLLKKELEAKVGVLAINMSLSIAATVASIVGIGAEVTIFLLPIAGISAGIPSLVNNELILHDKATSVVNYFNHLSESKKYGPLKTEDDKILVPIDDLVISEIDFNNNSIKLGTCNILAMEGGSGHTVTGNIDHFFSSPSISSHIPSLSIYSAIGIETENLDFSKKIMMLPNAPSRVFWWETGAVPGLRSLENNGTKLLDSIRDLYPGKFYWRFYAFFDYAITTLKPVYEDTNIKIKLDKDTRNFIMPTITTNEIRNKLSYSFDGAGGTYSLLLSSYPISTNINLSKDDLWIFNIDNEVREISIENGTIKKGKLIKDVLSKIDINKNKLIIGNQTIDFSGDIDNKDRYIFLTCELDDKISLIIEINLVAKSYSLLLSGDKNYLISNLSNTIEKINTLGLDSKNIAYNYTDESNNKYFGAISKTSQKSIIHYKKDSKNILEFYNGSTLEFNSKDFIAEDINVFMKDDINTITGKYYVDNNTDKSIDFSISLVSKNQVKVNGLYLNESVYSSYLDFVKNSDGHHNTSNFMNLFLDNISFWKLFGFENINFVIDKYFTLVGKTNLGYVEFICDNNKNIDIYFGEWKTSSSKSTIFSGNGRNVVVEPIYNPDTGEDISTSLDFSYEPLYGIDRYINKVLIAPDLYTSLININTNYYSNEYYPEIIVLNPNTFHKKVNINLDSSSFEYKWSTEGSDFILVRYLEESNKKILQKIRIKGILSNTQSFNKMSIDFKDIKKLSLGYIMSNFKSFNSENELDRDHLGFKIIDNKTYYYDEDSKLVKGLININNSLFYFDPIEFNLVTGWQTINGKKYYFDINTGAALTSYKIINGKHFYFNNDGVMQLGVFKGPDGFEYFAPANTQNNNIEGQAIVYQSKFLTLNGKKYYFDNDSKAVTGWRIINNEKYYFNPNNAIAAVGLQVIDNNKYYFNPDTAIISKGWQTVNGSRYYFDTDTAIAFNGYKTIDGKHFYFDSDCVVKIGVFSTSNGFEYFAPANTYNNNIEGQAIVYQSKFLTLNGKKYYFDDNSKAVTGWQTIDSKKYYFNTNTAEAATGWQTIDGKKYYFNTNTAEAATGWQTIDGKKYYFNTNTAIASTGYTIINGKHFYFNTDGIMQIGVFKGPNGFEYFAPANTDANNIEGQAILYQNEFLTLNGKKYYFGSDSKAVTGWRIINNKKYYFNPNNAIAAIHLCTINNDKYYFSYDGILQNGYITIERNNFYFDANNESKMVTGVFKGPNGFEYFAPANTYNNNIEGQAIVYQNKFLTLNGKKYYFDNDSKAVTGWQTIDGKKYYFNLNTAEAATGWQTIDGKKYYFNLNTAEAATGWQTIDGKKYYFNTNTFIASTGYTSINGKHFYFNTDGIMQIGVFKGPNGFEYFAPANTHNNNIEGQAILYQNKFLTLNGKKYYFGSDSKAVTGLRTIDGKKYYFNTNTAVAVTGWQTINGKKYYFNTNTSIASTGYTIISGKHFYFNTDGIMQIGVFKGPDGFEYFAPANTDANNIEGQAIRYQNRFLYLHDNIYYFGNNSKAATGWVTIDGNRYYFEPNTAMGANGYKTIDNKNFYFRNGLPQIGVFKGSNGFEYFAPANTDANNIEGQAIRYQNRFLHLLGKIYYFGNNSKAVTGWQTINGKVYYFMPDTAMAAAGGLFEIDGVIYFFGVDGVKAPGIYG

SEQ ID NO: 287 - protein, 2709 aa, Artificial Sequence
  Synthetic amino acid sequence
SLISKEELIKLAYSIRPRENEYKTILTNLDEYNKLTTNNNENKYLQLKKLNESIDVFMNKYKTSSRNRALSNLKKDILKEVILIKNSNTSPVEKNLHFVAIGGEVSDIALEYIKQWADINAEYNIKLWYDSEAFLVNTLKKAIVESSTTEALQLLEEEIQNPQFDNMKFYKKRMEFIYDRQKRFINYYKSQINKPTVPTIDDIIKSHLVSEYNRDETVLESYRTNSLRKINSNHGIDIRANSLFTEQELLNIYSQELLNRGNLAAASDIVRLLALKNFGGVYLDVAMLPGIHSDLFKTISRPSSIGLDRWEMIKLEAIMKYKKYINNYTSENFDKLDQQLKDNFKLIIESKSEKSEIFSKLENLNVSDLEIKIAFALGSVINQALISKQGSYLTNLVIEQVKNRYQFLNQHLNPAIESDNNFTDTTKIFHDSLFNSATAENSMFLTKIAPYLQVGFMPEARSTISLSGPGAYASAYYDFINLQENTIEKTLKASDLIEFKFPENNLSQLTEQQINSLASFDQASAKYQFEKYVRDYTGGSLSEDNGVDFNKNTALDKNYLLNNKIPSNNVEEAGSKNYVHYIIQLQGDDISYEATCNLFSKNPKNSIIIQRNMNESAKSYFLSDDGESILELNKYRIPERLKNKEKVKVTFIGHGKDEFNTSEFARLSVDSLSNEISSFLDTIKLDISPKNVEVNLLGANMFSYDFNVEETYPGKLLLSIMDKITSTLPDVNKNSITIGANQYEVRINSEGRKELLAHSGKWINKEEAIMSDLSSKEYIFFDSIDNKLKAKSKNIPGLASISEDIKTLLLDASVSPDTKFILNNLKLNIESSIGDYIYYEKLEPVKNIIHNSIDDLIDEFNLLENVSDELYELKKLNNLDEKYLISFEDISKNNSTYSVRFINKSNGESVYVETEKEIFSKYSEHITKEISTIKNSIITDVNGNLLDNIQLDHTSQVNTLNAAFFIQSLIDYSSNKDVLNDLSTSVKVQLYAQLFSTGLNTIYDSIQLVNLISNAVNDTINVLPTITEGIPIVSTILDGINLGAAIKELLDEHDPLLKKELEAKVGVLAINMSLSIAATVASIVGIGAEVTIFLLPIAGISAGIPSLVNNELILHDKATSVVNYFNHLSESKKYGPLKTEDDKILVPIDDLVISEIDFNNNSIKLGTCNILAMEGGSGHTVTGNIDHFFSSPSISSHIPSLSIYSAIGIETENLDFSKKIMMLPNAPSRVFWWETGAVPGLRSLENDGTRLLDSIRDLYPGKFYWRFYAFFDYAITTLKPVYEDTNIKIKLDKDTRNFIMPTITTNEIRNKLSYSFDGAGGTYSLLLSSYPISTNINLSKDDLWIFNIDNEVREISIENGTIKKGKLIKDVLSKIDINKNKLIIGNQTIDFSGDIDNKDRYIFLTCELDDKISLIIEINLVAKSYSLLLSGDKNYLISNLSNTIEKINTLGLDSKNIAYNYTDESNNKYFGAISKTSQKSIIHYKKDSKNILEFYNDSTLEFNSKDFIAEDINVFMKDDINTITGKYYVDNNTDKSIDFSISLVSKNQVKVNGLYLNESVYSSYLDFVKNSDGHHNTSNFMNLFLDNISFWKLFGFENINFVIDKYFTLVGKTNLGYVEFICDNNKNIDIYFGEWKTSSSKSTIFSGNGRNVVVEPIYNPDTGEDISTSLDFSYEPLYGIDRYINKVLIAPDLYTSLININTNYYSNEYYPEIIVLNPNTFHKKVNINLDSSSFEYKWSTEGSDFILVRYLEESNKKILQKIRIKGILSNTQSFNKMSIDFKDIKKLSLGYIMSNFKSFNSENELDRDHLGFKIIDNKTYYYDEDSKLVKGLININNSLFYFDPIEFNLVTGWQTINGKKYYFDINTGAALTSYKIINGKHFYFNNDGVMQLGVFKGPDGFEYFAPANTQNNNIEGQAIVYQSKFLTLNGKKYYFDNNSKAVTGWRIINNEKYYFNPNNAIAAVGLQVIDNNKYYFNPDTAIISKGWQTVNGSRYYFDTDTAIAFNGYKTIDGKHFYFDSDCVVKIGVFSTSNGFEYFAPANTYNNNIEGQAIVYQSKFLTLNGKKYYFDNNSKAVTGWQTIDSKKYYFNTNTAEAATGWQTIDGKKYYFNTNTAEAATGWQTIDGKKYYFNTNTAIASTGYTIINGKHFYFNTDGIMQIGVFKGPNGFEYFAPANTDANNIEGQAILYQNEFLTLNGKKYYFGSDSKAVTGWRIINNKKYYFNPNNAIAAIHLCTINNDKYYFSYDGILQNGYITIERNNFYFDANNESKMVTGVFKGPNGFEYFAPANTHNNNIEGQAIVYQNKFLTLNGKKYYFDNDSKAVTGWQTIDGKKYYFNLNTAEAATGWQTIDGKKYYFNLNTAEAATGWQTIDGKKYYFNTNTFIASTGYTSINGKHFYFNTDGIMQIGVFKGPNGFEYFAPANTHNNNIEGQAILYQNKFLTLNGKKYYFGSDSKAVTGLRTIDGKKYYFNTNTAVAVTGWQTINGKKYYFNTNTSIASTGYTIISGKHFYFNTDGIMQIGVFKGPDGFEYFAPANTDANNIEGQAIRYQNRFLYLHDNIYYFGNNSKAATGWVTIDGNRYYFEPNTAMGANGYKTIDNKNFYFRNGLPQIGVFKGSNGFEYFAPANTDANNIEGQAIRYQNRFLHLLGKIYYFGNNSKAVTGWQTINGKVYYFMPDTAMAAAGGLFEIDGVIYFFGVDGVKAPGIYG

SEQ ID NO: 288 - protein, 2709 aa, Artificial Sequence
  Synthetic amino acid sequence
SLISKEELIKLAYSIRPRENEYKTILTNLDEYNKLTTNNNENKYLQLKKLNESIDVFMNKYKNSSRNRALSNLKKDILKEVILIKNSNTSPVEKNLHFVAIGGEVSDIALEYIKQWADINAEYNIKLWYDSEAFLVNTLKKAIVESSTTEALQLLEEEIQNPQFDNMKFYKKRMEFIYDRQKRFVNYYKSQINKPTVPTIDDIIKSHLVSEYNRDETLLESYRTNSLRKINSNHGIDIRANSLFTEQELLNIYSQELLNRGNLAAASDIVRLLALKNFGGVYLDVAMLPGIHSDLFKTISRPSSIGLDRWEMIKLEAIMKYKKYINNYTSENFDKLDQQLKDNFKLIIESKSEKSEIFSKLENLNVSDLEIKIAFALGSVINQALISKQGSYLTNLVIEQVKNRYQFLNQHLNPAIESDNNFTDTTKIFHDSLFNSATAENSMFLTKIAPYLQVGFMPEARSTISLSGPGAYASAYYDFINLQENTIEKTLKASDLIEFKFPENNLSQLTEQQINSLASFDQASAKYQFEKYVRDYTGGSLSEDNEVDFNKNTALDKNYLLNNKIPSNNVEEAGSKNYVHYIIQLQGDDISYEATCNLFSKNPKNSIIIQRNMNESAKSYFLSDDGESILELNKYRIPERLKNKEKVKVTFIGHGKDEFNTSEFARLSVDSLSNEISSFLDTIKLDISPKNVEVNLLGANMFSYDFNVEETYPGKLLLSIMDKITSTLPDVNKDSITIGANQYEVRINSEGRKELLAHSGKWINKEEAIMSDLSSKEYIFFDSIDNKLKAKSKNIPGLASISEDIKTLLLDTSVSPDTKFILNNLKLNIESSVGDYIYYEKLEPVKNIIHNSIDDLIDEFNLLENVSDELYELKKLNNLDEKYLISFEDISKNNSTYSVRFINKSNGESVYVETEKEIFSKYSEHITKEISTIKNSIITDVNGNLLDNIQLDHTSQVNTLNAAFFIQSLIDYSSNKDLLNDLSTSVKVQLYAQLFSTGLNTIYDSIQLVNLISNAVNDTINVLPTITEGIPIVSTILDGINLGAAIKELLDEHDPLLKKELEAKVGVLAINMSLSIAATVASIVGIGAEVTIFLLPIAGISAGIPSLVNNELILHDKATSVVNYFNHLSESKEYGPLKTEDDKILVPIDDLVISEIDFNNNAIKLGTCNILAMEGGSGHTVTGNIDHFFSSPSISSHIPSLSIYSAIGIKTENLDFSKKIMMLPNAPSRVFWWETGAVPGLRSLENNGTKLLDSIRDLYPGKFYWRFYAFFDYAITTLKPVYEDTNIKIKLDKDTRNFIMPTITTNEIRNKLSYSFDGAGGTYSLLLSSYPISTNINLSKDDLWIFNIDNEVREISIENGTIKKGKLIKDVLSKIDINKNKLIIGNQTIDFSGDIDNKDRYIFLTCELDDKISLIIEINLVAKSYSLLLSGDKNYLISNLSNTIEKINTLGLDSKNIAYNYTDESNNKYFGAISKTSQKSIIHYKKDSKNILEFYNGSTLEFNSKDFIAEDINVFMKDDINTITGKYYVDNNTDKSIDFSISLVSKNQAKVNGLYLNESVYSSYLDFVKNADGHHNTSNFMNLFLDNISFWKLFGFENINFVVDKYFTLVGKTNLGYVEFICDNNKNIDIYFGEWKTSSSKSTIFSGNGRNVVVEPIYNPDTGEDISTSLDFSYEPLYGIDRYINKVLIAPDLYTSLININTNYYSNEYYPEIIVLNPNTFHKKVNINLDSSSFEYKWSTEGSDFILVRYLEESNKKILQKIRIKGILSNTQSFNKMSIDFKDIKKLSLVYIMSNFKSFNSENELDRDHLGFKIIDNKTYYYDEASKLVKGLININNSLFYFDPIESNLVTGWQTINGKKYYFDINTGAALTSYKIINGKHFYFNNNGVMQLGVFKGPDRFEYFAPANTQNNNIEGQAIVYQSKFLTLNGKKYYFDNDSKAVTGWRIINNEKYYFNPNNAIAAVGLQVIDNNKYYFNPDTAIISKGWQTVNGSRYYFDTDTAIAFNGYKTIDGKHFYFDSDCVVKIGVFSGSNGFEYFAPANTYNNNIEGQAIVYQSKFLTLNGKKYYFDNNSKAVTGWQTIDSKKYYFNTNTAEAATGWQTIDGKKYYFNTNTAEVATGWQTIDGKKYYFNTNTSIASTGYTIINGKHFYFNTDGIMQIGVFKGPDGFEYFAPANTDANNIEGQAILYQNKFLTLNGKKYYFASDSKAVTGWRIINNKKYYFNPNNAIAATHLYTINNDKYYFSYDGILQNGYITIERNNFYFDANNESKMVTGVFKGPNGFEYFAPANTHNNNIEGQAIVYQNKFLTLNGKKYYFDNDSKAVTGWQTIDGKKYYFNLNTAVAVTGWQTIDGKKYYFNTNTAEAATGWQTIDGKKYYFNTNTSIASTGYTIINGKHFYFNTDGIMQIGVFKGPDGFEYFAPANTDANNIEGQAILYQNKFLTLNGKKYYFASDSKAVTGLRTIDGKKYYFNTNTAEAATGWQTIDGKKYYFNTNTSIASTGYTIINDKHFYFNTDGIMQIGVFKGPDGFEYFAPANTDANNIEGQAIRYQNRFLYLHDNIYYFGNNSKAATGWVTIDGRRYYFEPNTAIGANGYKIIDNKNFYFRNGLPQIGVFKGPNGFEYFAPANTDANNIDGQAIRYQNRFLHLLGNIYYFGNNSKAVTGWQTINGNMYYFMPDTAMAAAGGLFEIDGVIYFFGVDGVKAPGIYG

SEQ ID NO: 289 - protein, 2709 aa, Artificial Sequence
  Synthetic amino acid sequence
SLISKEELIKLAYSIRPRENEYKTILTNLDEYNKLTTNNNENKYLQLKKLNESIDVFMNKYKTSSRNRALSNLKKDILKEVILIKNSNTSPVEKNLHFVAIGGEVSDIALEYIKQWADINAEYNIKLWYDSEAFLVNTLKKAIVESSTTEALQLLEEEIQNPQFDNMKFYKKRMEFIYDRQKRFINYYKSQINKPTVPTIDDIIKSHLVSEYNRDETVLESYRTNSLRKINSNHGIDIRANSLFTEQELLNIYSQELLNRGNLAAASDIVRLLALKNFGGVYLDVAMLPGIHSDLFKTISRPSSIGLDRWEMIKLEAIMKYKKYINNYTSENFDKLDQQLKDNFKLIIESKSEKSEIFSKLENLNVSDLEIKIAFALGSVINQALISKQGSYLTNLVIEQVKNRYQFLNQHLNPAIESDNNFTDTTKIFHDSLFNSATAENSMFLTKIAPYLQVGFMPEARSTISLSGPGAYASAYYDFINLQENTIEKTLKASDLIEFKFPENNLSQLTEQQINSLASFDQASAKYQFEKYVRDYTGGSLSEDNGVDFNKNTALDKNYLLNNKIPSNNVEEAGSKNYVHYIIQLQGDDISYEATCNLFSKNPKNSIIIQRNMNESAKSYFLSDDGESILELNKYRIPERLKNKEKVKVTFIGHGKDEFNTSEFARLSVDSLSNEISSFLDTIKLDISPKNVEVNLLGANMFSYDFNVEETYPGKLLLSIMDKITSTLPDVNKNSITIGANQYEVRINSEGRKELLAHSGKWINKEEAIMSDLSSKEYIFFDSIDNKLKAKSKNIPGLASISEDIKTLLLDASVSPDTKFILNNLKLNIESSIGDYIYYEKLEPVKNIIHNSIDDLIDEFNLLENVSDELYELKKLNNLDEKYLISFEDISKNNSTYSVRFINKSNGESVYVETEKEIFSKYSEHITKEISTIKNSIITDVNGNLLDNIQLDHTSQVNTLNAAFFIQSLIDYSSNKDVLNDLSTSVKVQLYAQLFSTGLNTIYDSIQLVNLISNAVNDTINVLPTITEGIPIVSTILDGINLGAAIKELLDEHDPLLKKELEAKVGVLAINMSLSIAATVASIVGIGAEVTIFLLPIAGISAGIPSLVNNELILHDKATSVVNYFNHLSESKKYGPLKTEDDKILVPIDDLVISEIDFNNNSIKLGTCNILAMEGGSGHTVTGNIDHFFSSPSISSHIPSLSIYSAIGIETENLDFSKKIMMLPNAPSRVFWWETGAVPGLRSLENDGTRLLDSIRDLYPGKFYWRFYAFFDYAITTLKPVYEDTNIKIKLDKDTRNFIMPTITTNEIRNKLSYSFDGAGGTYSLLLSSYPISTNINLSKDDLWIFNIDNEVREISIENGTIKKGKLIKDVLSKIDINKNKLIIGNQTIDFSGDIDNKDRYIFLTCELDDKISLIIEINLVAKSYSLLLSGDKNYLISNLSNTIEKINTLGLDSKNIAYNYTDESNNKYFGAISKTSQKSIIHYKKDSKNILEFYNDSTLEFNSKDFIAEDINVFMKDDINTITGKYYVDNNTDKSIDFSISLVSKNQVKVNGLYLNESVYSSYLDFVKNSDGHHNTSNFMNLFLDNISFWKLFGFENINFVIDKYFTLVGKTNLGYVEFICDNNKNIDIYFGEWKTSSSKSTIFSGNGRNVVVEPIYNPDTGEDISTSLDFSYEPLYGIDRYINKVLIAPDLYTSLININTNYYSNEYYPEIIVLNPNTFHKKVNINLDSSSFEYKWSTEGSDFILVRYLEESNKKILQKIRIKGILSNTQSFNKMSIDFKDIKKLSLGYIMSNFKSFNSENELDRDHLGFKIIDNKTYYYDEDSKLVKGLININNSLFYFDPIEFNLVTGWQTINGKKYYFDINTGAALTSYKIINGKHFYFNNDGVMQLGVFKGPDGFEYFAPANTQNNNIEGQAIVYQSKFLTLNGKKYYFDNDSKAVTGWRIINNEKYYFNPNNAIAAVGLQVIDNNKYYFNPDTAIISKGWQTVNGSRYYFDTDTAIAFNGYKTIDGKHFYFDSDCVVKIGVFSTSNGFEYFAPANTYNNNIEGQAIVYQSKFLTLNGKKYYFDNNSKAVTGWQTIDSKKYYFNTNTAEAATGWQTIDGKKYYFNTNTAEAATGWQTIDGKKYYFNTNTAIASTGYTIINGKHFYFNTDGIMKIGVFKGPNGFEYFAPANTDANNIEGQAILYQNEFLTLNGKKYYFGSDSKAVTGWRIINNKKYYFNPNNAIAAIHLCTINNDKYYFSYDGILQNGYITIERNNFYFDANNESKMVTGVFKGPNGFEYFAPANTYNNNIEGQAIVYQNKFLTLNGKKYYFDNDSKAVTGWQTIDGKKYYFNLNTAEAATGWQTIDGKKYYFNLNTAEAATGWQTIDGKKYYFNTNTFIASTGYTSINGKHFYFNTDGIMQIGVFKGPNGFEYFAPANTHNNNIEGQAILYQNKFLTLNGKKYYFGSDSKAVTGLRTIDGKKYYFNTNTAVAVTGWQTINGKKYYFNTNTSIASTGYTIISGKHFYFNTDGIMQIGVFKGPDGFEYFAPANTDANNIEGQAIRYQNRFLYLHDNIYYFGNNSKAATGWVTIDGNRYYFEPNTAMGANGYKTIDNKNFYFRNGLPQIGVFKGSNGFEYFAPANTDANNIEGQAIRYQNRFLHLLGKIYYFGNNSKAVTGWQTINGKVYYFMPDTAMAAAGGLFEIDGVIYFFGVDGVKAPGIYG

SEQ ID NO: 290 - protein, 2709 aa, Artificial Sequence; identical to SEQ ID NO: 288
  Synthetic amino acid sequence

SEQ ID NO: 291 - protein, 2709 aa, Artificial Sequence
  Synthetic amino acid sequence
SLISKEELIKLAYSIRPRENEYKTILTNLDEYNKLTTNNNENKYLQLKKLNESIDVFMNKYKNSSRNRALSNLKKDILKEVILIKNSNTSPVEKNLHFVAIGGEVSDIALEYIKQWADINAEYNIKLWYDSEAFLVNTLKKAIVESSTTEALQLLEEEIQNPQFDNTKFYKKRMEFIYDRQKRFINYYKSQINKPTVPTIDDIIKSHLVSEYNRDETLLESYRTNSLRKINSNHGIDIRANSLFTEQELLNIYSQELLNRGNLAAASDIVRLLALKNFGGVYLDVAMLPGIHSDLFKTISRPSSIGLDRWEMIKLEAIMKYKKYINNYTSENFDKLDQQLKDNFKLIIESKSEKSEIFSKLENLNVSDLEIKIAFALGSVINQALISKQGSYLTNLVIEQVKNRYQFLNQHLNPAIESDNNFTDTTKIFHDSLFNSATAENSMFLTKIAPYLQVGFMPEARSTISLSGPGAYASAYYDFINLQENTIEKTLKASDLIEFKFPENNLSQLTEQQINSLASFDQASAKYQFEKYVRDYTGGSLSEDNGVDFNKNTALDKNYLLNNKIPSNNVEEAGSKNYVHYIIQLQGDDISYEATCNLFSKNPKNSIIIQRNMNESAKSYFLSDDGESILELNKYRIPERLKNKEKVKVTFIGHGKDEFNTSEFARLSVDSLSNEISSFLDTIKLDISPKNVEVNLLGANMFSYDFNVEETYPGKLLLSIMDKITSTLPDVNKDSITIGANQYEVRINSEGRKELLAHSGKWINKEEAIMSDLSSKEYIFFDSIDNKLKAKSKNIPGLASISEDIKTLLLDASVSPDTKFILNNLKLNIESSIGDYIYYEKLEPVKNIIHNSIDDLIDEFNLLENVSDELYELKKLNNLDEKYLISFEDISKNNSTYSVRFINKSNGESVYVETEKEIFSKYSEHITKEISTIKNSIITDVNGNLLDNIQLDHTSQVNTLNAAFFIQSLIDYSSNKDVLNDLSTSVKVQLYAQLFSTGLNTIYDSIQLVNLISNAVNDTINVLPTITEGIPIVSTILDGINLGAAIKELLDEHDPLLKKELEAKVGVLAINMSLSIAATVASIVGIGAEVTIFLLPIAGISAGIPSLVNNELILHDKATSVVNYFNHLSESKKYGPLKTEDDKILVPIDDLVISEIDFNNNSIKLGTCNILAMEGGSGHTVTGNIDHFFSSPYISSHIPSLSVYSAIGIKTENLDFSKKIMMLPNAPSRVFWWETGAVPGLRSLENDGTKLLDSIRDLYPGKFYWRFYAFFDYAITTLKPVYEDTNTKIKLDKDTRNFIMPTITTDEIRNKLSYSFDGAGGTYSLLLSSYPISMNINLSKDDLWIFNIDNEVREISIENGTIKKGNLIEDVLSKIDINKNKLIIGNQTIDFSGDIDNKDRYIFLTCELDDKISLIIEINLVAKSYSLLLSGDKNYLISNLSNTIEKINTLGLDSKNIAYNYTDESNNKYFGAISKTSQKSIIHYKKDSKNILEFYNGSTLEFNSKDFIAEDINVFMKDDINTITGKYYVDNNTDKSIDFSISLVSKNQVKVNGLYLNESVYSSYLDFVKNSDGHHNTSNFMNLFLNNISFWKLFGFENINFVIDKYFTLVGKTNLGYVEFICDNNKNIDIYFGEWKTLSSKSTIFSGNGRNVVVEPIYNPDTGEDISTSLDFSYEPLYGIDRYINKVLIAPDLYTSLININTNYYSNEYYPEIIVLNPNTFHKKVNINLDSSSFEYKWSTEGSDFILVRYLEESNKKILQKIRIKGILSNTQSFNKMSIDFKDIKKLSLGYIMSNFKSFNSENELDRDHLGFKIIDNKTYYYDEDSKLVKGLININNSLFYFDPIESNLVTGWQTINGKKYYFDINTGAASTSYKIINGKHFYFNNNGVMQLGVFKGPDGFEYFAPANTQNNNIEGQAIVYQSKFLTLNGKKYYFDNDSKAVTGWRIINNEKYYFNPNNAIAAVGLQVIDNNKYYFNPDTAIISKGWQTVNGSRYYFDTDTAIAFNGYKTIDGKHFYFDSDCVVKIGVFSGSNGFEYFAPANTYNNNIEGQAIVYQSKFLTLNGKKYYFDNNSKAVTGWQTIDSKKYYFNTNTAEAATGWQTIDGKKYYFNTNTAEAATGWQTIDGKKYYFNTNTSIASTGYTIINGKHFYFNTDGIMQIGVFKGPNGFEYFAPANTDANNIEGQAILYQNKFLTLNGKKYYFGSDSKAITGWQTIDGKKYYFNPNNAIAATHLCTINNDKYYFSYDGILQNGYITIERNNFYFDANNESKMVTGVFKGPNGFEYFAPANTHNNNIEGQAIVYQNKFLTLNGKKYYFDNDSKAVTGWQTIDSKKYYFNLNTAVAVTGWQTIDGEKYYFNLNTAEAATGWQTIDGKRYYFNTNTYIASTGYTIINGKHFYFNTDGIMQIGVFKGPDGFEYFAPANTHNNNIEGQAILYQNKFLTLNGKKYYFGSDSKAVTGLRTIDGKKYYFNTNTAVAVTGWQTINGKKYYFNTNTYIASTGYTIISGKHFYFNTDGIMQIGVFKGPDGFEYFAPANTDANNIEGQAIRYQNRFLYLHDNIYYFGNDSKAATGWATIDGNRYYFEPNTAMGANGYKTIDNKNFYFRNGLPQIGVFKGPNGFEYFAPANTDANNIDGQAIRYQNRFLHLLGNIYYFGNNSKAVTGWQTINGKVYYFMPDTAMAAAGGLFEIDGVIYFFGVDGVKAPGIYG

SEQ ID NO: 292 - protein, 2709 aa, Artificial Sequence; identical to SEQ ID NO: 291
  Synthetic amino acid sequence

SEQ ID NO: 293 - protein, 2709 aa, Artificial Sequence; identical to SEQ ID NO: 291
  Synthetic amino acid sequence

SEQ ID NO: 294 - protein, 2709 aa, Artificial Sequence
  Synthetic amino acid sequence
SLISKEELIKLAYSIRPRENEYKTILTNLDEYNKLTTNNNENKYLQLKKLNESIDVFMNKYKTSSRNRALSNLKKDILKEVILIKNSNTSPVEKNLHFVAIGGEVSDIALEYIKQWADINAEYNIKLWYDSEAFLVNTLKKAIVESSTTEALQLLEEEIQNPQFDNMKFYKKRMEFIYDRQKRFINYYKSQINKPTVPTIDDIIKSHLVSEYNRDETVLESYRTNSLRKINSNHGIDIRANSLFTEQELLNIYSQELLNRGNLAAASDIVRLLALKNFGGVYLDVAMLPGIHSDLFKTISRPSSIGLDRWEMIKLEAIMKYKKYINNYTSENFDKLDQQLKDNFKLIIESKSEKSEIFSKLENLNVSDLEIKIAFALGSVINQALISKQGSYLTNLVIEQVKNRYQFLNQHLNPAIESDNNFTDTTKIFHDSLFNSATAENSMFLTKIAPYLQVGFMPEARSTISLSGPGAYASAYYDFINLQENTIEKTLKASDLIEFKFPENNLSQLTEQQINSLASFDQASAKYQFEKYVRDYTGGSLSEDNGVDFNKNTALDKNYLLNNKIPSNNVEEAGSKNYVHYIIQLQGDDISYEATCNLFSKNPKNSIIIQRNMNESAKSYFLSDDGESILELNKYRIPERLKNKEKVKVTFIGHGKDEFNTSEFARLSVDSLSNEISSFLDTIKLDISPKNVEVNLLGANMFSYDFNVEETYPGKLLLSIMDKITSTLPDVNKNSITIGANQYEVRINSEGRKELLAHSGKWINKEEAIMSDLSSKEYIFFDSIDNKLKAKSKNIPGLASISEDIKTLLLDASVSPDTKFILNNLKLNIESSIGDYIYYEKLEPVKNIIHNSIDDLIDEFNLLENVSDELYELKKLNNLDEKYLISFEDISKNNSTYSVRFINKSNGESVYVETEKEIFSKYSEHITKEISTIKNSIITDVNGNLLDNIQLDHTSQVNTLNAAFFIQSLIDYSSNKDVLNDLSTSVKVQLYAQLFSTGLNTIYDSIQLVNLISNAVNDTINVLPTITEGIPIVSTILDGINLGAAIKELLDEHDPLLKKELEAKVGVLAINMSLSIAATVASIVGIGAEVTIFLLPIAGISAGIPSLVNNELILHDKATSVVNYFNHLSESKKYGPLKTEDDKILVPIDDLVISEIDFNNNSIKLGTCNILAMEGGSGHTVTGNIDHFFSSPSISSHIPSLSIYSAIGIETENLDFSKKIMMLPNAPSRVFWWETGAVPGLRSLENDGTRLLDSIRDLYPGKFYWRFYAFFDYAITTLKPVYEDTNIKIKLDKDTRNFIMPTITTNEIRNKLSYSFDGAGGTYSLLLSSYPISTNINLSKDDLWIFNIDNEVREISIENGTIKKGKLIKDVLSKIDINKNKLIIGNQTIDFSGDIDNKDRYIFLTCELDDKISLIIEINLVAKSYSLLLSGDKNYLISNLSNTIEKINTLGLDSKNIAYNYTDESNNKYFGAISKTSQKSIIHYKKDSKNILEFYNDSTLEFNSKDFIAEDINVFMKDDINTITGKYYVDNNTDKSIDFSISLVSKNQVKVNGLYLNESVYSSYLDFVKNSDGHHNTSNFMNLFLDNISFWKLFGFENINFVIDKYFTLVGKTNLGYVEFICDNNKNIDIYFGEWKTSSSKSTIFSGNGRNVVVEPIYNPDTGEDISTSLDFSYEPLYGIDRYINKVLIAPDLYTSLININTNYYSNEYYPEIIVLNPNTFHKKVNINLDSSSFEYKWSTEGSDFILVRYLEESNKKILQKIRIKGILSNTQSFNKMSIDFKDIKKLSLGYIMSNFKSFNSENELDRDHLGFKIIDNKTYYYDEDSKLVKGLININNSLFYFDPIEFNLVTGWQTINGKKYYFDINTGAALTSYKIINGKHFYFNNDGVMQLGVFKGPDGFEYFAPANTQNNNIEGQAIVYQSKFLTLNGKKYYFDNDSKAVTGWRIINNEKYYFNPNNAIAAVGLQVIDNNKYYFNPDTAIISKGWQTVNGSRYYFDTDTAIAFNGYKTIDGKHFYFDSDCVVKIGVFSTSNGFEYFAPANTYNNNIEGQAIVYQSKFLTLNGKKYYFDNNSKAVTGWQTIDSKKYYFNTNTAEAATGWQTIDGKKYYFNTNTAEAATGWQTIDGKKYYFNTNTAIASTGYTIINGKHFYFNTDGIMQIGVFKGPNGFEYFAPANTDANNIEGQAILYQNEFLTLNGKKYYFGSDSKAVTGWRIINNKKYYFNPNNAIAAIHLCTINNDKYYFSYDGILQNGYITIERNNFYFDANNESKMVTGVFKGPNGFEYFAPANTHNNNIEGQAIVYQNKFLTLNGKKYYFDNDSKAVTGWQTIDGKKYYFNLNTAEAATGWQTIDGKKYYFNLNTAEAATGWQTIDGKKYYFNTNTFIASTGYTSINGKHFYFNTDGIMQIGVFKGPNGFEYFAPANTHNNNIEGQAILYQNKFLTLNGKKYYFGSDSKAVTGLRTIDGKKYYFNTNTAVAVTGWQTINGKKYYFNTNTSIASTGYTIISGKHFYFNTDGIMQIGVFKGPDGFEYFAPANTDANNIEGQAIRYQNRFLYLHDNIYYFGNNSKAATGWVTIDGNRYYFEPNTAMGANGYKTIDNKNFYFRNGLPQIGVFKGSNGFEYFAPANTDANNIEGQAIRYQNRFLHLLGKIYYFGNNSKAVTGWQTINGKVYYFMPDTAMAAAGGLFEIDGVIYFFGVDGVKAPGIYG

SEQ ID NO: 295 - protein, 2709 aa, Artificial Sequence
  Synthetic amino acid sequence
SLISKEELIKLAYSIRPRENEYKTILTNLDEYNKLTTNNNENKYLQLKKLNESIDVFMNKYKTSSRNRALSNLKKDILKEVILIKNSNTSPVEKNLHFVAIGGEVSDIALEYIKQWADINAEYNIKLWYDSEAFLVNTLKKAIVESSTTEALQLLEEEIQNPQFDNMKFYKKRMEFIYDRQKRFINYYKSQINKPTVPTIDDIIKSHLVSEYNRDETVLESYRTNSLRKINSNHGIDIRANSLFTEQELLNIYSQELLNRGNLAAASDIVRLLALKNFGGVYLDVAMLPGIHSDLFKTISRPSSIGLDRWEMIKLEAIMKYKKYINNYTSENFDKLDQQLKDNFKLIIESKSEKSEIFSKLENLNVSDLEIKIAFALGSVINQALISKQGSYLTNLVIEQVKNRYQFLNQHLNPAIESDNNFTDTTKIFHDSLFNSATAENSMFLTKIAPYLQVGFMPEARSTISLSGPGAYASAYYDFINLQENTIEKTLKASDLIEFKFPENNLSQLTEQQINSLASFDQASAKYQFEKYVRDYTGGSLSEDNGVDFNKNTALDKNYLLNNKIPSNNVEEAGSKNYVHYIIQLQGDDISYEATCNLFSKNPKNSIIIQRNMNESAKSYFLSDDGESILELNKYRIPERLKNKEKVKVTFIGHGKDEFNTSEFARLSVDSLSNEISSFLDTIKLDISPKNVEVNLLGANMFSYDFNVEETYPGKLLLSIMDKITSTLPDVNKNSITIGANQYEVRINSEGRKELLAHSGKWINKEEAIMSDLSSKEYIFFDSIDNKLKAKSKNIPGLASISEDIKTLLLDASVSPDTKFILNNLKLNIESSIGDYIYYEKLEPVKNIIHNSIDDLIDEFNLLENVSDELYELKKLNNLDEKYLISFEDISKNNSTYSVRFINKSNGESVYVETEKEIFSKYSEHITKEISTIKNSIITDVNGNLLDNIQLDHTSQVNTLNAAFFIQSLIDYSSNKDVLNDLSTSVKVQLYAQLFSTGLNTIYDSIQLVNLISNAVNDTINVLPTITEGIPIVSTILDGINLGAAIKELLDEHDPLLKKELEAKVGVLAINMSLSIAATVASIVGIGAEVTIFLLPIAGISAGIPSLVNNELILHDKATSVVNYFNHLSESKKYGPLKTEDDKILVPIDDLVISEIDFNNNSIKLGTCNILAMEGGSGHTVTGNIDHFFSSPSISSHIPSLSIYSAIGIETENLDFSKKIMMLPNAPSRVFWWETGAVPGLRSLENDGTRLLDSIRDLYPGKFYWRFYAFFDYAITTLKPVYEDTNIKIKLDKDTRNFIMPTITTNEIRNKLSYSFDGAGGTYSLLLSSYPISTNINLSKDDLWIFNIDNEVREISIENGTIKKGKLIKDVLSKIDINKNKLIIGNQTIDFSGDIDNKDRYIFLTCELDDKISLIIEINLVAKSYSLLLSGDKNYLISNLSNTIEKINTLGLDSKNIAYNYTDESNNKYFGAISKTSQKSIIHYKKDSKNILEFYNDSTLEFNSKDFIAEDINVFMKDDVNTITGKYYVDNNTDKSIDFSISLVSKNQVKVNGLYLNESVYSSYLDFVKNSDGHHNTSNFMNLFLDNISFWKLFGFENINFVIDKYFTLVGKTNLGYVEFICDNNKNIDIYFGEWKTSSSKSTIFSGNGRNVVVEPIYNPDTGEDISTSLDFSYEPLYGIDRYINKVLIAPDLYTSLININTNYYSNEYYPEIIVLNPNTFHKKVNINLDSSSFEYKWSTEGSDFILVRYLEESNKKILQKIRIKGILSNTQSFNKMSIDFKDIKKLSLGYIMSNFKSFNSENELDRDHLGFKIIDNKTYYYDEDSKLVKGLININNSLFYFDPIEFNLVTGWQTINGKKYYFDINTGAALTSYKIINGKHFYFNNDGVMQLGVFKGPDGFEYFAPANTQNNNIEGQAIVYQSKFLTLNGKKYYFDNNSKAVTGWRIINNEKYYFNPNNAIAAVGLQVIDNNKYYFNPDTAIISKGWQTVNGSRYYFDTDTAIAFNGYKTIDGKHFYFDSDCVVKIGVFSTSNGFEYFAPANTYNNNIEGQAIVYQSKFLTLNGKKYYFDNNSKAVTGWQTIDSKKYYFNTNTAEAATGWQTIDGKKYYFNTNTAEAATGWQTIDGKKYYFNTNTAIASTGYTIINGKHFYFNTDGIMQIGVFKGPNGFEYFAPANTDANNIEGQAILYQNEFLTLNGKKYYFGSDSKAVTGWRIINNKKYYFNPNNAIAAIHLCTINNDKYYFSYDGILQNGYITIERNNFYFDANNESKMVTGVFKGPNGFEYFAPANTHNNNIEGQAIVYQNKFLTLNGKKYYFDNDSKAVTGWQTIDGKKYYFNLNTAEAATGWQTIDGKKYYFNLNTAEAATGWQTIDGKKYYFNTNTFIASTGYTSINGKHFYFNTDGIMQIGVFKGPNGFEYFAPANTDANNIEGQAILYQNKFLTLNGKKYYFGSDSKAVTGLRTIDGKKYYFNTNTAVAVTGWQTINGKKYYFNTNTSIASTGYTIISGKHFYFNTDGIMQIGVFKGPDGFEYFAPANTDANNIEGQAIRYQNRFLYLHDNIYYFGNNSKAATGWVTIDGNRYYFEPNTAMGANGYKTIDNKNFYFRNGLPQIGVFKGSNGFEYFAPANTDANNIEGQAIRYQNRFLHLLGKIYYFGNNSKAVTGWQTINGKVYYFMPDTAMAAAGGLFEIDGVIYFFGVDGVKAPGIYG

SEQ ID NO: 296 - protein, 2709 aa, Artificial Sequence
  Synthetic amino acid sequence
SLISKEELIKLAYSIRPRENEYKTILTNLDEYNKLTTNNNENKYLQLKKLNESIDVFMNKYKTSSRNRALSNLKKDILKEVILIKNSNTSPVEKNLHFVAIGGEVSDIALEYIKQWADINAEYNIKLWYDSEAFLVNTLKKAIVESSTTEALQLLEEEIQNPQFDNMKFYKKRMEFIYDRQKRFINYYKSQINKPTVPTIDDIIKSHLVSEYNRDETVLESYRTNSLRKINSNHGIDIRANSLFTEQELLNIYSQELLNRGNLAAASDIVRLLALKNFGGVYLDVAMLPGIHSDLFKTISRPSSIGLDRWEMIKLEAIMKYKKYINNYTSENFDKLDQQLKDNFKLIIESKSEKSEIFSKLENLNVSDLEIKIAFALGSVINQALISKQGSYLTNLVIEQVKNRYQFLNQHLNPAIESDNNFTDTTKIFHDSLFNSATAENSMFLTKIAPYLQVGFMPEARSTISLSGPGAYASAYYDFINLQENTIEKTLKASDLIEFKFPENNLSQLTEQQINSLASFDQASAKYQFEKYVRDYTGGSLSEDNGVDFNKNTALDKNYLLNNKIPSNNVEEAGSKNYVHYIIQLQGDDISYEATCNLFSKNPKNSIIIQRNMNESAKSYFLSDDGESILELNKYRIPERLKNKEKVKVTFIGHGKDEFNTSEFARLSVDSLSNEISSFLDTIKLDISPKNVEVNLLGANMFSYDFNVEETYPGKLLLSIMDKITSTLPDVNKNSITIGANQYEVRINSEGRKELLAHSGKWINKEEAIMSDLSSKEYIFFDSIDNKLKAKSKNIPGLASISEDIKTLLLDASVSPDTKFILNNLKLNIESSIGDYIYYEKLEPVKNIIHNSIDDLIDEFNLLENVSDELYELKKLNNLDEKYLISFEDISKNNSTYSVRFINKSNGESVYVETEKEIFSKYSEHITKEISTIKNSIITDVNGNLLDNIQLDHTSQVNTLNAAFFIQSLIDYSSNKDVLNDLSTSVKVQLYAQLFSTGLNTIYDSIQLVNLISNAVNDTINVLPTITEGIPIVSTILDGINLGAAIKELLDEHDPLLKKELEAKVGVLAINMSLSIAATVASIVGIGAEVTIFLLPIAGISAGIPSLVNNELILHDKATSVVNYFNHLSESKKYGPLKTEDDKILVPIDDLVISEIDFNNNSIKLGTCNILAMEGGSGHTVTGNIDHFFSSPSISSHIPSLSIYSAIGIETENLDFSKKIMMLPNAPSRVFWWETGAVPGLRSLENDGTRLLDSIRDLYPGKFYWRFYAFFDYAITTLKPVYEDTNIKIKLDKDTRNFIMPTITTNEIRNKLSYSFDGAGGTYSLLLSSYPISTNINLSKDDLWIFNIDNEVREISIENGTIKKGKLIKDVLSKIDINKNKLIIGNQTIDFSGDIDNKDRYIFLTCELDDKISLIIEINLVAKSYSLLLSGDKNYLISNLSNTIEKINTLGLDSKNIAYNYTDESNNKYFGAISKTSQKSIIHYKKDSKNILEFYNDSTLEFNSKDFIAEDINVFMKDDINTITGKYYVDNNTDKSIDFSISLVSKNQVKVNGLYLNESVYSSYLDFVKNSDGHHNTSNFMNLFLDNISFWKLFGFENINFVIDKYFTLVGKTNLGYVEFICDNNKNIDIYFGEWKTSSSKSTIFSGNGRNVVVEPIYNPDTGEDISTSLDFSYEPLYGIDRYINKVLIAPDLYTSLININTNYYSNEYYPEIIVLNPNTFHKKVNINLDSSSFEYKWSTEGSDFILVRYLEESNKKILQKIRIKGILSNTQSFNKMSIDFKDIKKLSLGYIMSNFKSFNSENELDRDHLGFKIIDNKTYYYDEDSKLVKGLININNSLFYFDPIEFNLVTGWQTINGKKYYFDINTGAALTSYKIINGKHFYFNNDGVMQLGVFKGPDGFEYFAPANTQNNNIEGQAIVYQSKFLTLNGKKYYFDNDSKAVTGWRIINNEKYYFNPNNAIAAVGLQVIDNNKYYFNPDTAIISKGWQTVNGSRYYFDTDTAIAFNGYKTIDGKHFYFDSDCVVKIGVFSTSNGFEYFAPANTYNNNIEGQAIVYQSKFLTLNGKKYYFDNNSKAVTGWQTIDSKKYYFNTNTAEAATGWQTIDGKKYYFNTNTAEAATGWQTIDGKKYYFNTNTAIASTGYTIINGKHFYFNTDGIMQIGVFKGPNGFEYFAPANTDANNIEGQAILYQNEFLTLNGKKYYFGSDSKAVTGWRIINNKKYYFNPNNAIAAIHLCTINNDKYYFSYDGILQNGYITIERNNFYFDANNESKMVTGVFKGPNGFEYFAPANTHNNNIEGQAIVYQNKFLTLNGKKYYFDNDSKAVTGWQTIDGKKYYFNLNTAEAATGWQTIDGKKYYFNLNTAEAATGWQTIDGKKYYFNTNTFIASTGYTSINGKHFYFNTDGIMQIGVFKGPNGFEYFAPANTDANNIEGQAILYQNKFLTLNGKKYYFGSDSKAVTGLRTIDGKKYYFNTNTAVAVTGWQTINGKKYYFNTNTSIASTGYTIISGKHFYFNTDGIMQIGVFKGPDGFEYFAPANTDANNIEGQAIRYQNRFLYLHDNIYYFGNNSKAATGWVTIDGNRYYFEPNTAMGANGYKTIDNKNFYFRNGLPQIGVFKGSNGFEYFAPANTDANNIEGQAIRYQNRFLHLLGKIYYFGNNSKAVTGWQTINGKVYYFMPDTAMAAAGGLFEIDGVIYFFGVDGVKAPGIYG

SEQ ID NO: 297 - protein, 2709 aa, Artificial Sequence; identical to SEQ ID NO: 294
  Synthetic amino acid sequence

SEQ ID NO: 298 - protein, 2709 aa, Artificial Sequence; identical to SEQ ID NO: 285
  Synthetic amino acid sequence

SEQ ID NO: 299 - protein, 2709 aa, Artificial Sequence; identical to SEQ ID NO: 294
  Synthetic amino acid sequence

SEQ ID NO: 300 - protein, 2709 aa, Artificial Sequence; identical to SEQ ID NO: 294
  Synthetic amino acid sequence

SEQ ID NO: 301 - protein, 2709 aa, Artificial Sequence
  Synthetic amino acid sequence
SLISKEELIKLAYSIRPRENEYKTILTNLDEYNKLTTNNNENKYLQLKKLNESIDVFMNKYKTSSRNRALSNLKKDILKEVILIKNSNTSPVEKNLHFVAIGGEVSDIALEYIKQWADINAEYNIKLWYDSEAFLVNTLKKAIVESSTTEALQLLEEEIQNPQFDNMKFYKKRMEFIYDRQKRFINYYKSQINKPTVPTIDDIIKSHLVSEYNRDETVLESYRTNSLRKINSNHGIDIRANSLFTEQELLNIYSQELLNRGNLAAASDIVRLLALKNFGGVYLDVAMLPGIHSDLFKTISRPSSIGLDRWEMIKLEAIMKYKKYINNYTSENFDKLDQQLKDNFKLIIESKSEKSEIFSKLENLNVSDLEIKIAFALGSVINQALISKQGSYLTNLVIEQVKNRYQFLNQHLNPAIESDNNFTDTTKIFHDSLFNSATAENSMFLTKIAPYLQVGFMPEARSTISLSGPGAYASAYYDFINLQENTIEKTLKASDLIEFKFPENNLSQLTEQQINSLASFDQASAKYQFEKYVRDYTGGSLSEDNGVDFNKNTALDKNYLLNNKIPSNNVEEAGSKNYVHYIIQLQGDDISYEATCNLFSKNPKNSIIIQRNMNESAKSYFLSDDGESILELNKYRIPERLKNKEKVKVTFIGHGKDEFNTSEFARLSVDSLSNEISSFLDTIKLDISPKNVEVNLLGANMFSYDFNVEETYPGKLLLSIMDKITSTLPDVNKNSITIGANQYEVRINSEGRKELLAHSGKWINKEEAIMSDLSSKEYIFFDSIDNKLKAKSKNIPGLASISEDIKTLLLDASVSPDTKFILNNLKLNIESSIGDYIYYEKLEPVKNIIHNSIDDLIDEFNLLENVSDELYELKKLNNLDEKYLISFEDISKNNSTYSVRFINKSNGESVYVETEKEIFSKYSEHITKEISTIKNSIITDVNGNLLDNIQLDHTSQVNTLNAAFFIQSLIDYSSNKDVLNDLSTSVKVQLYAQLFSTGLNTIYDSIQLVNLISNAVNDTINVLPTITEGIPIVSTILDGINLGAAIKELLDEHDPLLKKELEAKVGVLAINMSLSIAATVASIVGIGAEVTIFLLPIAGISAGIPSLVNNELILHDKATSVVNYFNHLSESKKYGPLKTEDDKILVPIDDLVISEIDFNNNSIKLGTCNILAMEGGSGHTVTGNIDHFFSSPSISSHIPSLSIYSAIGIETENLDFSKKIMMLPNAPSRVFWWETGAVPGLRSLENDGTRLLDSIRDLYPGKFYWRFYAFFDYAITTLKPVYEDTNIKIKLDKDTRNFIMPTITTNEIRNKLSYSFDGAGGTYSLLLSSYPISTNINLSKDDLWIFNIDNEVREISIENGTIKKGKLIKDVLSKIDINKNKLIIGNQTIDFSGDIDNKDRYIFLTCELDDKISLIIEINLVAKSYSLLLSGDKNYLISNLSNTIEKINTLGLDSKNIAYNYTDESNNKYFGAISKTSQKSIIHYKKDSKNILEFYNDSTLEFNSKDFIAEDINVFMKDDINTITGKYYVDNNTDKSIDFSISLVSKNQVKVNGLYLNESVYSSYLDFVKNSDGHHNTSNFMNLFLDNISFWKLFGFENINFVIDKYFTLVGKTNLGYVEFICDNNKNIDIYFGEWKTSSSKSTIFSGNGRNVVVEPIYNPDTGEDISTSLDFSYEPLYGIDRYINKVLIAPDLYTSLININTNYYSNEYYPEIIVLNPNTFHKKVNINLDSSSFEYKWSTEGSDFILVRYLEESNKKILQKIRIKGILSNTQSFNKMSIDFKDIKKLSLGYIMSNFKSFNSENELDRDHLGFKIIDNKTYYYDEDSKLVKGLININNSLFYFDPIEFNLVTGWQTINGKKYYFDINTGAALTSYKIINGKHFYFNNDGVMQLGVFKGPDGFEYFAPANTQNNNIEGQAIVYQSKFLTLNGKKYYFDNDSKAVTGWRIINNEKYYFNPNNAIAAVGLQVIDNNKYYFNPDTAIISKGWQTVNGSRYYFDTDTAIAFNGYKTIDGKHFYFDSDCVVKIGVFSTSNGFEYFAPANTYNNNIEGQAIVYQSKFLTLNGKKYYFDDNSKAVTGWQTIDSKKYYFNTNTAEAATGWQTIDGKKYYFNTNTAEAATGWQTIDGKKYYFNTNTAIASTGYTIINGKHFYFNTDGIMQIGVFKGPNGFEYFAPANTDANNIEGQAILYQNEFLTLNGKKYYFGSDSKAVTGWRIINNKKYYFNPNNAIAAIHLCTINNDKYYFSYDGILQNGYITIERNNFYFDANNESKMVTGVFKGPNGFEYFAPANTYNNNIEGQAIVYQNKFLTLNGKKYYFDNDSKAVTGWQTIDGKKYYFNLNTAEAATGWQTIDGKKYYFNLNTAEAATGWQTIDGKKYYFNTNTFIASTGYTSINGKHFYFNTDGIMQIGVFKGPNGFEYFAPANTHNNNIEGQAILYQNKFLTLNGKKYYFGSDSKAVTGLRTIDGKKYYFNTNTAVAVTGWQTINGKKYYFNTNTSIASTGYTIISGKHFYFNTDGIMQIGVFKGPDGFEYFAPANTDANNIEGQAIRYQNRFLYLHDNIYYFGNNSKAATGWVTIDGNRYYFEPNTAMGANGYKTIDNKNFYFRNGLPQIGVFKGSNGFEYFAPANTDANNIEGQAIRYQNRFLHLLGKIYYFGNNSKAVTGWQTINGKVYYFMPDTAMAAAGGLFEIDGVIYFFGVDGVKAPGIYG

SEQ ID NO: 302 - protein, 2708 aa, Artificial Sequence
  Synthetic amino acid sequence
SLISKEELIKLAYSIRPRENEYKTILTNLDEYNKLTTNNNENKYLQLKKLNESIDVFMNKYKTSSRNRALSNLKKDILKEVILIKNSNTSPVEKNLHFVAIGGEVSDIALEYIKQWADINAEYNIKLWYDSEAFLVNTLKKAIVESSTTEALQLLEEEIQNPQFDNMKFYKKRMEFIYDRQKRFINYYKSQINKPTVPTIDDIIKSHLVSEYNRDETVLESYRTNSLRKINSNHGIDIRANSLFTEQELLNIYSQGLLNRGNLAAASDIVRLLALKNFGGVYLDVAMLPGIHSDLFKTISRPSSIGLDRWEMIKLEAIMKYKKYINNYTSENFDKLDQQLKDNFKLIIESKSEKSEIFSKLENLNVSDLEIKIAFALGSVINQALISKQGSYLTNLVIEQVKNRYQFLNQHLNPAIESDNNFTDTTKIFHDSLFNSATAENSMFLTKIAPYLQVGFMPEARSTISLSGPGAYASAYYDFINLQENTIEKTLKASDLIEFKFPENNLSQLTQQINSLASFDQASAKYQFEKYVRDYTGGSLSEDNGVDFNKNTALDKNYLLNNKIPSNNVEEAGSKNYVHYIIQLQGDDISYEATCNLFSKNPKNSIIIQRNMNESAKSYFLSDDGESILELNKYRIPERLKNKEKVKVTFIGHGKDEFNTSEFARLSVDSLSNEISSFLDTIKLDISPKNVEVNLLGANMFSYDFNVEETYPGKLLLSIMDKITSTLPDVNKNSITIGANQYEVRINSEGRKELLAHSGKWINKEEAIMSDLSSKEYIFFDSIDNKLKAKSKNIPGLASISEDIKTLLLDASVSPDTKFILNNLKLNIESSIGDYIYYEKLEPVKNIIHNSIDDLIDEFNLLENVSDELYELKKLNNLDEKYLISFEDISKNNSTYSVRFINKSNGESVYVETEKEIFSKYSEHITKEISTIKNSIITDVNGNLLDNIQLDHTSQVNTLNAAFFIQSLIDYSSNKDVLNDLSTSVKVQLYAQLFSTGLNTIYDSIQLVNLISNAVNDTINVLPTITEGIPIVSTILDGINLGAAIKELLDEHDPLLKKELEAKVGVLAINMSLSIAATVASIVGIGAEVTIFLLPIAGISAGIPSLVNNELILHDKATSVVNYFNHLSESKKYGPLKTEDDKILVPIDDLVISEIDFNNNSIKLGTCNILAMEGGSGHTVTGNIDHFFSSPSISSHIPSLSIYSAIGIETENLDFSKKIMMLPNAPSRVFWWETGAVPGLRSLENDGTRLLDSIRDLYPGKFYWRFYAFFDYAITTLKPVYEDTNIKIKLDKDTRNFIMPTITTNEIRNKLSYSFDGAGGTYSLLLSSYPISTNINLSKDDLWIFNIDNEVREISIENGTIKKGKLIKDVLSKIDINKNKLIIGNQTIDFSGDIDNKDRYIFLTCELDDKISLIIEINLVAKSYSLLLSGDKNYLISNLSNIIEKINTLGLDSKNIAYNYTDESNNKYFGAISKTSQKSIIHYKKDSKNILEFYNDSTLEFNSKDFIAEDINVFMKDDINTITGKYYVDNNTDKSIDFSISLVSKNQVKVNGLYLNESVYSSYLDFVKNSDGHHNTSNFMNLFLDNISFWKLFGFENINFVIDKYFTLVGKTNLGYVEFICDNNKNIDIYFGEWKTSSSKSTIFSGNGRNVVVEPIYNPDTGEDISTSLDFSYEPLYGIDRYINKVLIAPDLYTSLININTNYYSNEYYPEIIVLNPNTFHKKVNINLDSSSFEYKWSTEGSDFILVRYLEESNKKILQKIRIKGILSNTQSFNKMSIDFKDIKKLSLGYIMSNFKSFNSENELDRDHLGFKIIDNKTYYYDEDSKLVKGLININNSLFYFDPIEFNLVTGWQTINGKKYYFDINTGAALISYKIINGKHFYFNNDGVMQLGVFKGPDGFEYFAPANTQNNNIEGQAIVYQSKFLTLNGKKYYFDNDSKAVTGWRIINNEKYYFNPNNAIAAVGLQVIDNNKYYFNPDTAIISKGWQTVNGSRYYFDTDTAIAFNGYKTIDGKHFYFDSDCVVKIGVFSTSNGFEYFAPANTYNNNIEGQAIVYQSKFLTLNGKKYYFDNNSKAVTGWQTIDSKKYYFNTNTAEAATGWQTIDGKKYYFNTNTAEAATGWQTIDGKKYYFNTNTAIASTGYTIINGKHFYFNTDGIMQIGVFKGPNGFEYFAPANTDANNIEGQAILYQNEFLTLNGKKYYFGSDSKAVTGWRIINNKKYYFNPNNAIAAIHLCTINNDKYYFSYDGILQNGYITIERNNFYFDANNESKMVTGVFKGPNGFEYFAPANTHNNNIEGQAIVYQNKFLTLNGKKYYFDNDSKAVTGWQTIDGKKYYFNLNTAEAATGWQTIDGKKYYFNLNTAEAATGWQTIDGKKYYFNTNTFIASTGYTSINGKHFYFNTDGIMQIGVFKGPNGFEYFAPANTHNNNIEGQAILYQNKFLTLNGKKYYFGSDSKAVTGLRTIDGKKYYFNTNTAVAVTGWQTINGKKYYFNTNTSIASTGYTIISGKHFYFNTDGIMQIGVFKGPDGFEYFAPANTDANNIEGQAIRYQNRFLYLHDNIYYFGNNSKAATGWVTIDGNRYYFEPNTAMGANGYKTIDNKNFYFRNGLPQIGVFKGSNGFEYFAPANTDANNIEGQAIRYQNRFLHLLGKIYYFGNNSKAVTGWQTINGKVYYFMPDTAMAAAGGLFEIDGVIYFFGVDGVKAPGIYG

SEQ ID NO: 303 - protein, 2708 aa, Artificial Sequence
  Synthetic amino acid sequence
SLISKEELIKLAYSIRPRENEYKTILTNLDEYNKLTTNNNENKYLQLKKLNESIDVFMNKYKTSSRNRALSNLKKDILKEVILIKNSNTSPVEKNLHFVAIGGEVSDIALEYIKQWADINAEYNIKLWYDSEAFLVNTLKKAIVESSTTEALQLLEEEIQNPQFDNMKFYKKRMEFIYDRQKRFINYYKSQINKPTVPTIDDIIKSHLVSEYNRDETVLESYRTNSLRKINSNHGIDIRANSLFTEQELLNIYSQELLNRGNLAAASDIVRLLALKNFGGVYLDVAMLPGIHSDLFKTISRPSSIGLDRWEMIKLEAIMKYKKYINNYTSENFDKLDQQLKDNFKLIIESKSEKSEIFSKLENLNVSDLEIKIAFALGSVINQALISKQGSYLTNLVIEQVKNRYQFLNQHLNPAIESDNNFTDTTKIFHDSLFNSATAENSMFLTKIAPYLQVGFMPEARSTISLSGPGAYASAYYDFINLQENTIEKTLKASDLIEFKFPENNLSQLTQQINSLASFDQASAKYQFEKYVRDYTGGSLSEDNGVDFNKNTALDKNYLLNNKIPSNNVEEAGSKNYVHYIIQLQGDDISYEATCNLFSKNPKNSIIIQRNMNESAKSYFLSDDGESILELNKYRIPERLKNKEKVKVTFIGHGKDEFNTSEFARLSVDSLSNEISSFLDTIKLDISPKNVEVNLLGANMFSYDFNVEETYPGKLLLSIMDKITSTLPDVNKNSITIGANQYEVRINSEGRKELLAHSGKWINKEEAIMSDLSSKEYIFFDSIDNKLKAKSKNIPGLASISEDIKTLLLDASVSPDTKFILNNLKLNIESSIGDYIYYEKLEPVKNIIHNSIDDLIDEFNLLENVSDELYELKKLNNLDEKYLISFEDISKNNSTYSVRFINKSNGESVYVETEKEIFSKYSEHITKEISTIKNSIITDVNGNLLDNIQLDHTSQVNTLNAAFFIQSLIDYSSNKDVLNDLSTSVKVQLYAQLFSTGLNTIYDSIQLVNLISNAVNDTINVLPTITEGIPIVSTILDGINLGAAIKELLDEHDPLLKKELEAKVGVLAINMSLSIAATVASIVGIGAEVTIFLLPIAGISAGIPSLVNNELILHDKATSVVNYFNHLSESKKYGPLKTEDDKILVPIDDLVISEIDFNNNSIKLGTCNILAMEGGSGHTVTGNIDHFFSSPSISSHIPSLSIYSAIGIETENLDFSKKIMMLPNAPSRVFWWETGAVPGLRSLENDGTRLLDSIRDLYPGKFYWRFYAFFDYAITTLKPVYEDTNIKIKLDKDTRNFIMPTITTNEIRNKLSYSFDGAGGTYSLLLSSYPISTNINLSKDDLWIFNIDNEVREISIENGTIKKGKLIKDVLSKIDINKNKLIIGNQTIDFSGDIDNKDRYIFLTCELDDKISLIIEINLVAKSYSLLLSGDKNYLISNLSNTIEKINTLGLDSKNIAYNYTDESNNKYFGAISKTSQKSIIHYKKDSKNILEFYNDSTLEFNSKDFIAEDINVFMKDDINTITGKYYVDNNTDKSIDFSISLVSKNQVKVNGLYLNESVYSSYLDFVKNSDGHHNTSNFMNLFLDNISFWKLFGFENINFVIDKYFTLVGKTNLGYVEFICDNNKNIDIYFGEWKTSSSKSTIFSGNGRNVVVEPIYNPDTGEDISTSLDFSYEPLYGIDRYINKVLIAPDLYTSLININTNYYSNEYYPEIIVLNPNTFHKKVNINLDSSSFEYKWSTEGSDFILVRYLEESNKKILQKIRIKGILSNTQSFNKMSIDFKDIKKLSLGYIMSNFKSFNSENELDRDHLGFKIIDNKTYYYDEDSKLVKGLININNSLFYFDPIEFNLVTGWQTINGKKYYFDINTGAALTSYKIINGKHFYFNNDGVMQLGVFKGPDGFEYFAPANTQNNNIEGQAIVYQSKFLTLNGKKYYFDNDSKAVTGWRIINNEKYYFNPNNAIAAVGLQVIDNNKYYFNPDTAIISKGWQTVNGSRYYFDTDTAIAFNGYKTIDGKHFYFDSDCVVKIGVFSTSNGFEYFAPANTYNNNIEGQAIVYQSKFLTLNGKKYYFDNNSKAVTGWQTIDSKKYYFNTNTAEAATGWQTIDGKKYYFNTNTAEAATGWQTIDGKKYYFNTNTAIASTGYTIINGKHFYFNTDGIMQIGVFKGPNGFEYFAPANTDANNIEGQAILYQNEFLTLNGKKYYFGSDSKAVTGWRIINNKKYYFNPNNAIAAIHLCTINNDKYYFSYDGILQNGYITIERNNFYFDANNESKMVTGVFKGPNGFEYFAPANTHNNNIEGQAIVYQNKFLTLNGKKYYFDNDSKAVTGWQTIDGKKYYFNLNTAEAATGWQTIDGKKYYFNLNTAEAATGWQTIDGKKYYFNTNTFIASTGYTSINGKHFYFNTDGIMQIGVFKGPNGFEYFAPANTHNNNIEGQAILYQNKFLTLNGKKYYFGSDSKAVTGLRTIDGKKYYFNTNTAVAVTGWQTINGKKYYFNTNTSIASTGYTIISGKHFYFNTDGIMQIGVFKGPDGFEYFAPANTDANNIEGQAIRYQNRFLYLHDNIYYFGNNSKAATGWVTIDGNRYYFEPNTAMGANGYKTIDNKNFYFRNGLPQIGVFKGSNGFEYFAPANTDANNIEGQAIRYQNRFLHLLGKIYYFGNNSKAVTGWQTINGKVYYFMPDTAMAAAGGLFEIDGVIYFFGVDGVKAPGIYG

SEQ ID NO: 304 - protein, 2709 aa, Artificial Sequence
  Synthetic amino acid sequence
SLISKEELIKLAYSIRPRENEYKTILTNLDEYNKLTTNNNENKYLQLKKLNESIDVFMNKYKTSSRNRALSNLKKDILKEVILIKNSNTSPVEKNLHFVAIGGEVSDIALEYIKQWADINAEYNIKLWYDSEAFLVNTLKKAIVESSTTEALQLLEEEIQNPQFDNMKFYKKRMEFIYDRQKRFINYYKSQINKPTVPTIDDIIKSHLVSEYNRDETVLESYRTNSLRKINSNHGIDIRANSLFTEQELLNIYSQELLNRGNLAAASDIVRLLALKNFGGVYLDVAMLPGIHSDLFKTISRPSSIGLDRWEMIKLEAIMKYKKYINNYTSENFDKLDQQLKDNFKLIIESKSEKSEIFSKLENLNVSDLEIKIAFALGSVINQALISKQGSYLTNLVIEQVKNRYQFLNQHLNPAIESDNNFTDTTKIFHDSLFNSATAENSMFLTKIAPYLQVGFMPEARSTISLSGPGAYASAYYDFINLQENTIEKTLKASDLIEFKFPENNLSQLTEQQINSLASFDQASAKYQFEKYVRDYTGGSLSEDNGVDFNKNTALDKNYLLNNKIPSNNVEEAGSKNYVHYIIQLQGDDISYEATCNLFSKNPKNSIIIQRNMNESAKSYFLSDDGESILELNKYRIPERLKNKEKVKVTFIGHGKDEFNTSEFARLSVDSLSNEISSFLDTIKLDISPKNVEVNLLGANMFSYDFNVEETYPGKLLLSIMDKITSTLPDVNKNSITIGANQYEVRINSEGRKELLAHSGKWINKEEAIMSDLSSKEYIFFDSIDNKLKAKSKNIPGLASISEDIKTLLLDASVSPDTKFILNNLKLNIESSIGDYIYYEKLEPVKNIIHNSIDDLIDEFNLLENVSDELYELKKLNNLDEKYLISFEDISKNNSTYSVRFINKSNGESVYVETEKEIFSKYSEHITKEISTIKNSIITDVNGNLLDNIQLDHTSQVNTLNAAFFIQSLIDYSSNKDVLNDLSTSVKVQLYAQLFSTGLNTIYDSIQLVNLISNAVNDTINVLPTITEGIPIVSTILDGINLGAAIKELLDEHDPLLKKELEAKVGVLAINMSLSIAATVASIVGIGAEVTIFLLPIAGISAGIPSLVNNELILHDKATSVVNYFNHLSESKKYGPLKTEDDKILVPIDDLVISEIDFNNNSIKLGTCNILAMEGGSGHTVTGNIDHFFSSPSISSHIPSLSIYSAIGIETENLDFSKKIMMLPNAPSRVFWWETGAVPGLRSLENDGTRLLDSIRDLYPGKFYWRFYAFFDYAITTLKPVYEDTNIKIKLDKDTRNFIMPTITTNEIRNKLSYSFDGAGGTYSLLLSSYPISTNINLSKDDLWIFNIDNEVREISIENGTIKKGKLIKDVLSKIDINKNKLIIGNQTIDFSGDIDNKDRYIFLTCELDDKISLIIEINLVAKSYSLLLSGDKNYLISNLSNTIEKINTLGLDSKNIAYNYTDESNNKYFGAISKTSQKSIIHYKKDSKNILEFYNDSTLEFNSKDFIAEDINVFMKDDINTITGKYYVDNNTDKSIDFSISLVSKNQVKVNGLYLNESVYSSYLDFVKNSDGHHNTSNFMNLFLDNISFWKLFGFENINFVIDKYFTLVGKTNLGYVEFICDNNKNIDIYFGEWKTSSSKSTIFSGNGRNVVVEPIYNPDTGEDISTSLDFSYEPLYGIDRYINKVLIAPDLYTSLININTNYYSNEYYPEIIVLNPNTFHKKVNINLDSSSFEYKWSTEGSDFILVRYLEESNKKILQKIRIKGILSNTQSFNKMSIDFKDIKKLSLGYIMSNFKSFNSENELDRDHLGFKIIDNKTYYYDEDSKLVKGLININNSLFYFDPIEFNLVTGWQTINGKKYYFDINTGAALTSYKIINGKHFYFNNDGVMQLGVFKGPDGFEYFAPANTQNNNIEGQAIVYQSKFLTLNGKKYYFDNNSKAVTGWRIINNEKYYFNPNNAIAAVGLQVIDNNKYYFNPDTAIISKGWQTVNGSRYYFDTDTAIAFNGYKTIDGKHFYFDSDCVVKIGVFSTSNGFEYFAPANTYNNNIEGQAIVYQSKFLTLNGKKYYFDNNSKAVTGWQTIDSKKYYFNTNTAEAATGWQTIDGKKYYFNTNTAEAATGWQTIDGKKYYFNTNTAIASTGYTIINGKHFYFNTDGIMQIGVFKGPNGFEYFAPANTDANNIEGQAILYQNEFLTLNGKKYYFGSDSKAVTGWRIINNKKYYFNPNNAIAAIHLCTINNDKYYFSYDGILQNGYITIERNNFYFDANNESKMVTGVFKGPNGFEYFAPANTHNNNIEGQAIVYQNKFLTLNGKKYYFDNDSKAVTGWQTIDGKKYYFNLNTAEAATGWQTIDGKKYYFNLNTAEAATGWQTIDGKKYYFNTNTFIASTGYTSINGKHFYFNTDGIMQIGVFKGPNGFEYFAPANTDANNIEGQAILYQNKFLTLNGKKYYFGSDSKAVTGLRTIDGKKYYFNTNTAVAVTGWQTINGKKYYFNTNTSIASTGYTIISGKHFYFNTDGIMQIGVFKGPDGFEYFAPANTDANNIEGQAIRYQNRFLYLHDNIYYFGNNSKAATGWVTIDGNRYYFEPNTAMGANGYKTIDNKNFYFRNGLPQIGVFKGSNGFEYFAPANTDANNIEGQAIRYQNRFLHLLGKIYYFGNNSKAVTGWQTINGKVYYFMPDTAMAAAGGLFEIDGVIYFFGVDGVKAPGIYG

SEQ ID NO: 305 - protein, 2709 aa, Artificial Sequence
  Synthetic amino acid sequence
SLISKEELIKLAYSIRPRENEYKTILTNLDEYNKLTTNNNENKYLQLKKLNESIDVFMNKYKTSSRNRALSNLKKDILKEVILIKNSNTSPVEKNLHFVAIGGEVSDIALEYIKQWADINAEYNIKLWYDSEAFLVNTLKKAIVESSTTEALQLLEEEIQNPQFDNMKFYKKRMEFIYDRQKRFINYYKSQINKPTVPTIDDIIKSHLVSEYNRDETVLESYRTNSLRKINSNHGIDIRANSLFTEQELLNIYSQELLNRGNLAAASDIVRLLALKNFGGVYLDVAMLPGIHSDLFKTISRPSSIGLDRWEMIKLEAIMKYKKYINNYTSENFDKLDQQLKDNFKLIIESKSEKSEIFSKLENLNVSDLEIKIAFALGSVINQALISKQGSYLTNLVIEQVKNRYQFLNQHLNPAIESDNNFTDTTKIFHDSLFNSATAENSMFLTKIAPYLQVGFMPEARSTISLSGPGAYASAYYDFINLQENTIEKTLKASDLIEFKFPENNLSQLTEQQINSLASFDQASAKYQFEKYVRDYTGGSLSEDNGVDFNKNTALDKNYLLNNKIPSNNVEEAGSKNYVHYIIQLQGDDISYEATCNLFSKNPKNSIIIQRNMNESAKSYFLSDDGESILELNKYRIPERLKNKEKVKVTFIGHGKDEFNTSEFARLSVDSLSNEISSFLDTIKLDISPKNVEVNLLGANMFSYDFNVEETYPGKLLLSIMDKITSTLPDVNKNSITIGANQYEVRINSEGRKELLAHSGKWINKEEAIMSDLSSKEYIFFDSIDNKLKAKSKNIPGLASISEDIKTLLLDASVSPDTKFILNNLKLNIESSIGDYIYYEKLEPVKNIIHNSIDDLIDEFNLLENVSDELYELKKLNNLDEKYLISFEDISKNNSTYSVRFINKSNGESVYVETEKEIFSKYSEHITKEISTIKNSIITDVNGNLLDNIQLDHTSQVNTLNAAFFIQSLIDYSSNKDVLNDLSTSVKVQLYAQLFSTGLNTIYDSIQLVNLISNAVNDTINVLPTITEGIPIVSTILDGINLGAAIKELLDEHDPLLKKELEAKVGVLAINMSLSIAATVASIVGIGAEVTIFLLPIAGISAGIPSLVNNELILHDKATSVVNYFNHLSESKKYGPLKTEDDKILVPIDDLVISEIDFNNNSIKLGTCNILAMEGGSGHTVTGNIDHFFSSPSISSHIPSLSIYSAIGIETENLDFSKKIMMLPNAPSRVFWWETGAVPGLRSLENDGTRLLDSIRDLYPGKFYWRFYAFFDYAITTLKPVYEDTNIKIKLDKDTRNFIMPTITTNEIRNKLSYSFDGAGGTYSLLLSSYPISTNINLSKDDLWIFNIDNEVREISIENGTIKKGKLIKDVLSKIDINKNKLIIGNQTIDFSGDIDNKDRYIFLTCELDDKISLIIEINLVAKSYSLLLSGNKNYLISNLSNTIEKINTLGLDSKNIAYNYTDESNNKYFGAISKTSQKSIIHYKKDSKNILEFYNDSTLEFNSKDFIAEDINVFMKDDINTITGKYYVDNNTDKGIDFSISLVSKNQVKVNGLYLNESVYSSYLDFVKNSDGHHNTSNFMNLFLDNISFWKLFGFENINFVIDKYFTLVGKTNLGYVEFICDNNKNIDIYFGEWKTSSSKSTIFSGNGRNVVVEPIYNPDTGEDISTSLDFSYEPLYGIDRYINKVLIAPDLYTSLININTNYYSNEYYPEIIVLNPNTFHKKVNINLDSSSFEYKWSTEGSDFILVRYLEESNKKILQKIRIKGILSNTQSFNKMSIDFKDIKKLSLGYIMSNFKSFNSENELDRDHLGFKIIDNKTYYYDEDSKLVKGLININNSLFYFDPIEFNLVTGWQTINGKKYYFDINTGAALTSYKIINGKHFYFNNDGVMQLGVFKGPDGFEYFAPANTQNNNIEGQAIVYQSKFLTLNGKKYYFDNDSKAVTGWRIINNEKYYFNPNNAIAAVGLQVIDNNKYYFNPDTAIISKGWQTVNGSRYYFDTDTAIAFNGYKTIDGKHFYFDSDCVVKIGVFSTSNGFEYFAPANTYNNNIEGQAIVYQSKFLTLNGKKYYFDDNSKAVTGWQTIDSKKYYFNTNTAEAATGWQTIDGKKYYFNTNTAEAATGWQTIDGKKYYFNTNTAIASTGYTIINGKHFYFNTDGIMQIGVFKGPNGFEYFAPANTDANNIEGQAILYQNEFLTLNGKKYYFGSDSKAVTGWRIINNKKYYFNPNNAIAAIHLCTINNDKYYFSYDGILQNGYITIERNNFYFDANNESKMVTGVFKGPNGFEYFAPANTHNNNIEGQAIVYQNKFLTLNGKKYYFDNDSKAVTGWQTIDGKKYYFNLNTAEAATGWQTIDGKKYYFNLNTAEAATGWQTIDGKKYYFNTNTFIASTGYTSINGKHFYFNTDGIMQIGVFKGPNGFEYFAPANTHNNNIEGQAILYQNKFLTLNGKKYYFGSDSKAVTGLRTIDGKKYYFNTNTAVAVTGWQTINGKKYYFNTNTSIASTGYTIISGKHFYFNTDGIMQIGVFKGPDGFEYFAPANTDANNIEGQAIRYQNRFLYLHDNIYYFGNNSKAATGWVTIDGNRYYFEPNTAMGANGYKTIDNKNFYFRNGLPQIGVFKGSNGFEYFAPANTDANNIEGQAIRYQNRFLHLLGKIYYFGNNSKAVTGWQTINGKVYYFMPDTAMAAAGGLFEIDGVIYFFGVDGVKAPGIYG

SEQ ID NO: 306 - protein, 2709 aa, Artificial Sequence; identical to SEQ ID NO: 305
  Synthetic amino acid sequence

SEQ ID NO: 307 - protein, 2709 aa, Artificial Sequence; identical to SEQ ID NO: 294
  Synthetic amino acid sequence

SEQ ID NO: 308 - protein, 2709 aa, Artificial Sequence; identical to SEQ ID NO: 286
  Synthetic amino acid sequence

SEQ ID NO: 309 - protein, 2709 aa, Artificial Sequence
  Synthetic amino acid sequence
SLISKEELIKLAYSIRPRENEYKTILTNLDEYNKLTTNNNENKYLQLKKLNESIDVFMNKYKTSSRNRALSNLKKDILKEVILIKNSNTSPVEKNLHFVAIGGEVSDIALEYIKQWADINAEYNIKLWYDSEAFLVNTLKKAIVESSTTEALQLLEEEIQNPQFDNMKFYKKRMEFIYDRQKRFINYYKSQINKPTVPTIDDIIKSHLVSEYNRDETVLESYRTNSLRKINSNHGIDIRANSLFTEQELLNIYSQELLNRGNLAAASDIVRLLALKNFGGVYLDVAMLPGIHSDLFKTISRPSSIGLDRWEMIKLEAIMKYKKYINNYTSENFDKLDQQLKDNFKLIIESKSEKSEIFSKLENLNVSDLEIKIAFALGSVINQALISKQGSYLTNLVIEQVKNRYQFLNQHLNPAIESDNNFTDTTKIFHDSLFNSATAENSMFLTKIAPYLQVGFMPEARSTISLSGPGAYASAYYDFINLQENTIEKTLKASDLIEFKFPENNLSQLTEQQINSLASFDQASAKYQFEKYVRDYTGGSLSEDNGVDFNKNTALDKNYLLNNKIPSNNVEEAGSKNYVHYIIQLQGDDISYEATCNLFSKNPKNSIIIQRNMNESAKSYFLSDDGESILELNKYRIPERLKNKEKVKVTFIGHGKDEFNTSEFARLSVDSLSNEISSFLDTIKLDISPKNVEVNLLGANMFSYDFNVEETYPGKLLLSIMDKITSTLPDVNKNSITIGANQYEVRINSEGRKELLAHSGKWINKEEAIMSDLSSKEYIFFDSIDNKLKAKSKNIPGLASISEDIKTLLLDASVSPDTKFILNNLKLNIESSIGDYIYYEKLEPVKNIIHNSIDDLIDEFNLLENVSDELYELKKLNNLDEKYLISFEDISKNNSTYSVRFINKSNGESVYVETEKEIFSKYSEHITKEISTIKNSIITDVNGNLLDNIQLDHTSQVNTLNAAFFIQSLIDYSSNKDVLNDLSTSVKVQLYAQLFSTGLNTIYDSIQLVNLISNAVNDTINVLPTITEGIPIVSTILDGINLGAAIKELLDEHDPLLKKELEAKVGVLAINMSLSIAATVASIVGIGAEVTIFLLPIAGISAGIPSLVNNELILHDKATSVVNYFNHLSESKKYGPLKTEDDKILVPIDDLVISEIDFNNNSIKLGTCNILAMEGGSGHTVTGNIDHFFSSPSISSHIPSLSIYSAIGIETENLDFSKKIMMLPNAPSRVFWWETGAVPGLRSLENDGTRLLDSIRDLYPGKFYWRFYAFFDYAITTLKPVYEDTNIKIKLDKDTRNFIMPTITTNEIRNKLSYSFDGAGGTYSLLLSSYPISTNINLSKDDLWIFNIDNEVREISIENGTIKKGKLIKDVLSKIDINKNKLIIGNQTIDFSGDIDNKDRYIFLTCELDDKISLIIEINLVAKSYSLLLSGDKNYLISNLSNTIEKINTLGLDSKNIAYNYTDESNNKYFGAISKTSQKSIIHYKKDSKNILEFYNDSTLEFNSKDFIAEDINVFMKDDINTITGKYYVDNNTDKSIDFSISLVSKNQVKVNGLYLNESVYSSYLDFVKNSDGHHNTSNFMNLFLDNISFWKLFGFENINFVIDKYFTLVGKTNLGYVEFICDNNKNIDIYFGEWKTSSSKSTIFSGNGRNVVVEPIYNPNTGEDISTSLDFSYEPLYGIDRYINKVLIAPDLYTSLININTNYYSNEYYPEIIVLNPNTFHKKVNINLDSSSFEYKWSTEGSDFILVRYLEESNKKILQKIRIKGILSNTQSFNKMSIDFKDIKKLSLGYIMSNFKSFNSENELDRDHLGFKIIDNKTYYYDEDSKLVKGLININNSLFYFDPIEFNLVTGWQTINGKKYYFDINTGAALTSYKIINGKHFYFNNDGVMQLGVFKGPDGFEYFAPANTQNNNIEGQAIVYQSKFLTLNGKKYYFDNNSKAVTGWRIINNEKYYFNPNNAIAAVGLQVIDNNKYYFNPDTAIISKGWQTVNGSRYYFDTDTAIAFNGYKTIDGKHFYFDSDCVVKIGVFSTSNGFEYFAPANTYNNNIEGQAIVYQSKFLTLNGKKYYFDNNSKAVTGWQTIDSKKYYFNTNTAEAATGWQTIDGKKYYFNTNTAEAATGWQTIDGKKYYFNTNTAIASTGYTIINGKHFYFNTDGIMQIGVFKGPNGFEYFAPANTDANNIEGQAILYQNEFLTLNGKKYYFGSDSKAVTGWRIINNKKYYFNPNNAIAAIHLCTINNDKYYFSYDGILQNGYITIERNNFYFDANNESKMVTGVFKGPNGFEYFAPANTHNNNIEGQAIVYQNKFLTLNGKKYYFDNDSKAVTGWQTIDGKKYYFNLNTAEAATGWQTIDGKKYYFNLNTAEAATGWQTIDGKKYYFNTNTFIASTGYTSINGKHFYFNTDGIMQIGVFKGPNGFEYFAPANTDANNIEGQAILYQNKFLTLNGKKYYFGSDSKAVTGLRTIDGKKYYFNTNTAVAVTGWQTINGKKYYFNTNTSIASTGYTIISGKHFYFNTDGIMQIGVFKGPDGFEYFAPANTDANNIEGQAIRYQNRFLYLHDNIYYFGNNSKAATGWVTIDGNRYYFEPNTAMGANGYKTIDNKNFYFRNGLPQIGVFKGSNGFEYFAPANTDANNIEGQAIRYQNRFLHLLGKIYYFGNNSKAVTGWQTINGKVYYFMPDTAMAAAGGLFEIDGVIYFFGVDGVKAPGIYG

SEQ ID NO: 310 - protein, 2709 aa, Artificial Sequence
  Synthetic amino acid sequence
SLISKEELIKLAYSIRPRENEYKTILTNLDEYNKLTTNNNENKYLQLKKLNESIDVFMNKYKTSSRNRALSNLKKDILKEVILIKNSNTSPVEKNLHFVAIGGEVSDIALEYIKQWADINAEYNIKLWYDSEAFLVNTLKKAIVESSTTEALQLLEEEIQNPQFDNMKFYKKRMEFIYDRQKRFINYYKSQINKPTVPTIDDIIKSHLVSEYNRDETVLESYRTNSLRKINSNHGIDIRANSLFTEQELLNIYSQELLNRGNLAAASDIVRLLALKNFGGVYLDVAMLPGIHSDLFKTISRPSSIGLDRWEMIKLEAIMKYKKYINNYTSENFDKLDQQLKDNFKLIIESKSEKSEIFSKLENLNVSDLEIKIAFALGSVINQALISKQGSYLTNLVIEQVKNRYQFLNQHLNPAIESDNNFTDTTKIFHDSLFNSATAENSMFLTKIAPYLQVGFMPEARSTISLSGPGAYASAYYDFINLQENTIEKTLKASDLIEFKFPENNLSQLTEQQINSLASFDQASAKYQFEKYVRDYTGGSLSEDNGVDFNKNTALDKNYLLNNKIPSNNVEEAGSKNYVHYIIQLQGDDISYEATCNLFSKNPKNSIIIQRNMNESAKSYFLSDDGESILELNKYRIPERLKNKEKVKVTFIGHGKDEFNTSEFARLSVDSLSNEISSFLDTIKLDISPKNVEVNLLGANMFSYDFNVEETYPGKLLLSIMDKITSTLPDVNKNSITIGANQYEVRINSEGRKELLAHSGKWINKEEAIMSDLSSKEYIFFDSIDNKLKAKSKNIPGLASISEDIKTLLLDASVSPDTKFILNNLKLNIESSIGDYIYYEKLEPVKNIIHNSIDDLIDEFNLLENVSDELYELKKLNNLDEKYLISFEDISKNNSTYSVRFINKSNGESVYVETEKEIFSKYSEHITKEISTIKNSIITDVNGNLLDNIQLDHTSQVNTLNAAFFIQSLIDYSSNKDVLNDLSTSVKVQLYAQLFSTGLNTIYDSIQLVNLISNAVNDTINVLPTITEGIPIVSTILDGINLGAAIKELLDEHDPLLKKELEAKVGVLAINMSLSIAATVASIVGIGAEVTIFLLPIAGISAGIPSLVNNELILHDKATSVVNYFNHLSESKKYGPLKTEDDKILVPIDDLVISEIDFNNNSIKLGTCNILAMEGGSGHTVTGNIDHFFSSPSISSHIPSLSIYSAIGIETENLDFSKKIMMLPNAPSRVFWWETGAVPGLRSLENDGTRLLDSIRDLYPGKFYWRFYAFFDYAITTLKPVYEDTNIKIKLDKDTRNFIMPTITTNEIRNKLSYSFDGAGGTYSLLLSSYPISTNINLSKDDLWIFNIDNEVREISIENGTIKKGKLIKDVLSKIDINKNKLIIGNQTIDFSGDIDNKDRYIFLTCELDDKISLIIEINLVAKSYSLLLSGDKNYLISNLSNTIEKINTLGLDSKNIAYNYTDESNNKYFGAISKTSQKSIIHYKKDSKNILEFYNDSTLEFNSKDFIAEDINVFMKDDVNTITGKYYVDNNTDKSIDFSISLVSKNQVKVNGLYLNESVYSSYLDFVKNSDGHHNTSNFMNLFLDNISFWKLFGFENINFVIDKYFTLVGKTNLGYVEFICDNNKNIDIYFGEWKTSSSKSTIFSGNGRNVVVEPIYNPDTGEDISTSLDFSYEPLYGIDRYINKVLIAPDLYTSLININTNYYSNEYYPEIIVLNPNTFHKKVNINLDSSSFEYKWSTEGSDFILVRYLEESNKKILQKIRIKGILSNTQSFNKMSIDFKDIKKLSLGYIMSNFKSFNSENELDRDHLGFKIIDNKTYYYDEDSKLVKGLININNSLFYFDPIEFNLVTGWQTINGKKYYFDINTGAALTSYKIINGKHFYFNNDGVMQLGVFKGPDGFEYFAPANTQNNNIEGQAIVYQSKFLTLNGKKYYFDNNSKAVTGWRIINNEKYYFNPNNAIAAVGLQVIDNNKYYFNPDTAIISKGWQTVNGSRYYFDTDTAIAFNGYKTIDGKHFYFDSDCVVKIGVFSTSNGFEYFAPANTYNNNIEGQAIVYQSKFLTLNGKKYYFDNNSKAVTGWQTIDSKKYYFNTNTAEAATGWQTIDGKKYYFNTNTAEAATGWQTIDGKKYYFNTNTAIASTGYTIINGKHFYFNTDGIMQIGVFKGPNGFEYFAPANTDANNIEGQAILYQNEFLTLNGKKYYFGSDSKAVTGWRIINNKKYYFNPNNAIAAIHLCTINNDKYYFSYDGILQNGYITIERNNFYFDANNESKMVTGVFKGPNGFEYFAPANTHNNNIEGQAIVYQNKFLTLNGKKYYFDNDSKAVTGWQTIDGKKYYFNLNTAEAATGWQTIDGKKYYFNLNTAEAATGWQTIDGKKYYFNTNTFIASTGYTSINGKHFYFNTDGIMQIGVFKGPNGFEYFAPANTHNNNIEGQAILYQNKFLTLNGKKYYFGSDSKAVTGLRTIDGKKYYFNTNTAVAVTGWQTINGKKYYFNTNTSIASTGYTIISGKHFYFNTDGIMQIGVFKGPDGFEYFAPANTDANNIEGQAIRYQNRFLYLHDNIYYFGNNSKAATGWVTIDGNRYYFEPNTAMGANGYKTIDNKNFYFRNGLPQIGVFKGSNGFEYFAPANTDANNIEGQAIRYQNRFLHLLGKIYYFGNNSKAVTGWQTINGKVYYFMPDTAMAAAGGLFEIDGVIYFFGVDGVKAPGIYG

SEQ ID NO: 311 - protein, 2709 aa, Artificial Sequence
  Synthetic amino acid sequence
SLISKEELIKLAYSIRPRENEYKTILTNLDEYNKLTTNNNENKYLQLKKLNESIDVFMNKYKTSSRNRALSNLKKDILKEVILIKNSNTSPVEKNLHFVAIGGEVSDIALEYIKQWADINAEYNIKLWYDSEAFLVNTLKKAIVESSTTEALQLLEEEIQNPQFDNMKFYKKRMEFIYDRQKRFINYYKSQINKPTVPTIDDIIKSHLVSEYNRDETLLESYRTNSLRKINSNHGIDIRANSLFTEQELLNIYSQELLNRGNLAAASDIVRLLALKNFGGVYLDVAMLPGIHSDLFKTISRPSSIGLDRWEMIKLEAIMKYKKYINNYTSENFDKLDQQLKDNFKLIIESKSEKSEIFSKLENLNVSDLEIKIAFALGSVINQALISKQGSYLTNLVIEQVKNRYQFLNQHLNPAIESDNNFTDTTKIFHDSLFNSATAENSMFLTKIAPYLQVGFMPEARSTISLSGPGAYASAYYDFINLQENTIEKTLKASDLIEFKFPENNLSQLTEQQINSLASFDQASAKYQFEKYVRDYTGGSLSEDNGVDFNKNTALDKNYLLNNKIPSNNVEEAGSKNYVHYIIQLQGDDISYEATCNLFSKNPKNSIIIQRNMNESAKSYFLSDDGESILELNKYRIPERLKNKEKVKVTFIGHGKDEFNTSEFARLSVDSLSNEISSFLDTIKLDISPKNVEVNLLGANMFSYDFNVEETYPGKLLLSIMDKITSTLPDVNKNSITIGANQYEVRINSEGRKELLAHSGKWINKEEAIMSDLSSKEYIFFDSIDNKLKAKSKNIPGLASISEDIKTLLLDASVSPDTKFILNNLKLNIESSIGDYIYYEKLEPVKNIIHNSIDDLIDEFNLLENVSDELYELKKLNNLDEKYLISFEDISKNNSTYSVRFINKSNGESVYVETEKEIFSKYSEHITKEISTIKNSIITDVNGNLLDNIQLDHTSQVNTLNAAFFIQSLIDYSSNKDVLNDLSTSVKVQLYAQLFSTGLNTIYDSIQLVNLISNAVNDTINVLPTITEGIPIVSTILDGINLGAAIKELLDEHDPLLKKELEAKVGVLAINMSLSIAATVASIVGIGAEVTIFLLPIAGISAGIPSLVNNELILHDKATSVVNYFNHLSESKKYGPLKTEDDKILVPIDDLVISEIDFNNNSIKLGTCNILAMEGGSGHTVTGNIDHFFSSPSISSHIPSLSIYSAIGIETENLDFSKKIMMLPNAPSRVFWWETGAVPGLRSLENDGTRLLDSIRDLYPGKFYWRFYAFFDYAITTLKPVYEDTNIKIKLDKDTRNFIMPTITTNEIRNKLSYSFDGAGGTYSLLLSSYPISTNINLSKDDLWIFNIDNEVREISIENGTIKKGKLIKDVLSKIDINKNKLIIGNQTIDFSGDIDNKDRYIFLTCELDDKISLIIEINLVAKSYSLLLSGNKNYLISNLSNTIEKINTLGLDSKNIAYNYTDESNNKYFGAISKTSQKSIIHYKKDSKNILEFYNDSTLEFNSKDFIAEDINVFMKDDINTITGKYYVDNNTDKGIDFSISLVSKNQVKVNGLYLNESVYSSYLDFVKNSDGHHNTSNFMNLFLDNISFWKLFGFENINFVIDKYFTLVGKTNLGYVEFICDNNKNIDIYFGEWKTSSSKSTIFSGNGRNVVVEPIYNPDTGEDISTSLDFSYEPLYGIDRYINKVLIAPDLYTSLININTNYYSNEYYPEIIVLNPNTFHKKVNINLDSSSFEYKWSTEGSDFILVRYLEESNKKILQKIRIKGILSNTQSFNKMSIDFKDIKKLSLGYIMSNFKSFNSENELDRDHLGFKIIDNKTYYYDEDSKLVKGLININNSLFYFDPIEFNLVTGWQTINGKKYYFDINTGAALTSYKIINGKHFYFNNDGVMQLGVFKGPDGFEYFAPANTQNNNIEGQAIVYQSKFLTLNGKKYYFDNDSKAVTGWRIINNEKYYFNPNNAIAAVGLQVIDNNKYYFNPDTAIISKGWQTVNGSRYYFDTDTAIAFNGYKTIDGKHFYFDSDCVVKIGVFSTSNGFEYFAPANTYNNNIEGQAIVYQSKFLTLNGKKYYFDNNSKAVTGWQTIDSKKYYFNTNTAEAATGWQTIDGKKYYFNTNTAEAATGWQTIDGKKYYFNTNTAIASTGYTIINGKHFYFNTDGIMQIGVFKGPNGFEYFAPANTDANNIEGQAILYQNEFLTLNGKKYYFGSDSKAVTGWRIINNKKYYFNPNNAIAAIHLCTINNDKYYFSYDGILQNGYITIERNNFYFDANNESKMVTGVFKGPNGFEYFAPANTHNNNIEGQAIVYQNKFLTLNGKKYYFDNDSKAVTGWQTIDGKKYYFNLNTAEAATGWQTIDGKKYYFNLNTAEAATGWQTIDGKKYYFNTNTFIASTGYTSINGKHFYFNTDGIMQIGVFKGPNGFEYFAPANTHNNNIEGQAILYQNKFLTLNGKKYYFGSDSKAVTGLRTIDGKKYYFNTNTAVAVTGWQTINGKKYYFNTNTSIASTGYTIISGKHFYFNTDGIMQIGVFKGPDGFEYFAPANTDANNIEGQAIRYQNRFLYLHDNIYYFGNNSKAATGWVTIDGNRYYFEPNTAMGANGYKTIDNKNFYFRNGLPQIGVFKGSNGFEYFAPANTDANNIEGQAIRYQNRFLHLLGKIYYFGNNSKAVTGWQTINGKVYYFMPDTAMAAAGGLFEIDGVIYFFGVDGVKAPGIYG

SEQ ID NO: 312 - protein, 2709 aa, Artificial Sequence; identical to SEQ ID NO: 287
  Synthetic amino acid sequence

SEQ ID NO: 313 - protein, 2709 aa, Artificial Sequence
  Synthetic amino acid sequence
SLISKEELIKLAYSIRPRENEYKTILTNLDEYNKLTTNNNENKYLQLKKLNESIDVFMNKYKNSSRNRALSNLKKDILKEVILIKNSNTSPVEKNLHFVAIGGEVSDIALEYIKQWADINAEYNIKLWYDSEAFLVNTLKKAIVESSTTEALQLLEEEIQNPQFDNMKFYKKRMEFIYDRQKRFVNYYKSQINKPTVPTIDDIIKSHLVSEYNRDETLLESYRTNSLRKINSNHGIDIRANSLFTEQELLNIYSQELLNRGNLAAASDIVRLLALKNFGGVYLDVAMLPGIHSDLFKTISRPSSIGLDRWEMIKLEAIMKYKKYINNYTSENFDKLDQQLKDNFKLIIESKSEKSEIFSKLENLNVSDLEIKIAFALGSVINQALISKQGSYLTNLVIEQVKNRYQFLNQHLNPAIESDNNFTDTTKIFHDSLFNSATAENSMFLTKIAPYLQVGFMPEARSTISLSGPGAYASAYYDFINLQENTIEKTLKASDLIEFKFPENNLSQLTEQQINSLASFDQASAKYQFEKYVRDYTGGSLSEDNEVDFNKNTALDKNYLLNNKIPSNNVEEAGSKNYVHYIIQLQGDDISYEATCNLFSKNPKNSIIIQRNMNESAKSYFLSDDGESILELNKYRIPERLKNKEKVKVTFIGHGKDEFNTSEFARLSVDSLSNEISSFLDTIKLDISPKNVEVNLLGANMFSYDFNVEETYPGKLLLSIMDKITSTLPDVNKDSITIGANQYEVRINSEGRKELLAHSGKWINKEEAIMSDLSSKEYIFFDSIDNKLKAKSKNIPGLASISEDIKTLLLDTSVSPDTKFILNNLKLNIESSVGDYIYYEKLEPVKNIIHNSIDDLIDEFNLLENVSDELYELKKLNNLDEKYLISFEDISKNNSTYSVRFINKSNGESVYVETEKEIFSKYSEHITKEISTIKNSIITDVNGNLLDNIQLDHTSQVNTLNAAFFIQSLIDYSSNKDLLNDLSTSVKVQLYAQLFSTGLNTIYDSIQLVNLISNAVNDTINVLPTITEGIPIVSTILDGINLGAAIKELLDEHDPLLKKELEAKVGVLAINMSLSIAATVASIVGIGAEVTIFLLPIAGISAGIPSLVNNELILHDKATSVVNYFNHLSESKEYGPLKTEDDKILVPIDDLVISEIDFNNNAIKLGTCNILAMEGGSGHTVTGNIDHFFSSPSISSHIPSLSIYSAIGIKTENLDFSKKIMMLPNAPSRVFWWETGAVPGLRSLENNGTKLLDSIRDLYPGKFYWRFYAFFDYAITTLKPVYEDTNIKIKLDKDTRNFIMPTITTNEIRNKLSYSFDGAGGTYSLLLSSYPISTNINLSKDDLWIFNIDNEVREISIENGTIKKGKLIKDVLSKIDINKNKLIIGNQTIDFSGDIDNKDRYIFLTCELDDKISLIIEINLVAKSYSLLLSGDKNYLISNLSNTIEKINTLGLDSKNIAYNYTDESNNKYFGAISKTSQKSIIHYKKDSKNILEFYNGSTLEFNSKDFIAEDINVFMKDDINTITGKYYVDNNTDKSIDFSISLVSKNQAKVNGLYLNESVYSSYLDFVKNADGHHNTSNFMNLFLDNISFWKLFGFENINFVVDKYFTLVGKTNLGYVEFICDNNKNIDIYFGEWKTSSSKSTIFSGNGRNVVVEPIYNPDTGEDISTSLDFSYEPLYGIDRYINKVLIAPDLYTSLININTNYYSNEYYPEIIVLNPNTFHKKVNINLDSSSFEYKWSTEGSDFILVRYLEESNKKILQKIRIKGILSNTQSFNKMSIDFKDIKKLSLVYIMSNFKSFNSENELDRDHLGFKIIDNKTYYYDEASKLVKGLININNSLFYFDPIESNLVTGWQTINGKKYYFDINTGAALTSYKIINGKHFYFNNNGVMQLGVFKGPDRFEYFAPANTQNNNIEGQAIVYQSKFLTLNGKKYYFDNDSKAVTGWRIINNEKYYFNPNNAIAAVGLQVIDNNKYYFNPDTAIISKGWQTVNGSRYYFDTDTAIAFNGYKTIDGKHFYFDSDCVVKIGVFSGSNGFEYFAPANTYNNNIEGQAIVYQSKFLTLNGKKYYFDNNSKAVTGWQTIDSKKYYFNTNTAEAATGWQTIDGKKYYFNTNTAEAATGWQTIDGKKYYFNTNTSIASTGYTIINGKHFYFNTDGIMQIGVFKGPNGFEYFAPANTDANNIEGQAILYQNKFLTLNGKKYYFASDSKAVTGWRIINNKKYYFNPNNAIAATHLYTINNDKYYFSYDGILQNGYITIERNNFYFDANNESKMVTGVFKGPNGFEYFAPANTHNNNIEGQAIVYQNKFLTLNGKKYYFDNDSKAVTGWQTIDGKKYYFNLNTAVAVTGWQTIDGKKYYFNLNTAEAATGWQTIDGKKYYFNTNTFIASTGYTSINGKHFYFNTDGIMQIGVFKGPNGFEYFAPANTHNNNIEGQAILYQNKFLTLNGKKYYFASDSKAVTGLRTIDGKKYYFNTNTAVAATGWQTINGKKYYFNTNTSIASTGYTIINGKHFYFNTDGIMQIGVFKGPDGFEYFAPANTDANNIEGQAIRYQNRFLYLHDNIYYFGNNSKAATGWVTIDGRRYYFEPNTAIGANGYKIIDNKNFYFRNGLPQIGVFKGPNGFEYFAPANTDANNIDGQAIRYQNRFLHLLGNIYYFGNNSKAVTGWQTINGNMYYFMPDTAMAAAGGLFEIDGVIYFFGVDGVKAPGIYG

SEQ ID NO: 314 - protein, 2709 aa, Artificial Sequence; identical to SEQ ID NO: 294
  Synthetic amino acid sequence

SEQ ID NO: 315 - protein, 2709 aa, Artificial Sequence
  Synthetic amino acid sequence
SLISKEELIKLAYSIRPRENEYKTILTNLDEYNKLTTNNNENKYLQLKKLNESIDVFMNKYKNSSRNRALSNLKKDILKEVILIKNSNTSPVEKNLHFVAIGGEVSDIALEYIKQWADINAEYNIKLWYDSEAFLVNTLKKAIVESSTTEALQLLEEEIQNPQFDNMKFYKKRMEFIYDRQKRFVNYYKSQINKPTVPTIDDIIKSHLVSEYNRDETLLESYRTNSLRKINSNHGIDIRANSLFTEQELLNIYSQELLNRGNLAAASDIVRLLALKNFGGVYLDVAMLPGIHSDLFKTISRPSSIGLDRWEMIKLEAIMKYKKYINNYTSENFDKLDQQLKDNFKLIIESKSEKSEIFSKLENLNVSDLEIKIAFALGSVINQALISKQGSYLTNLVIEQVKNRYQFLNQHLNPAIESDNNFTDTTKIFHDSLFNSATAENSMFLTKIAPYLQVGFMPEARSTISLSGPGAYASAYYDFINLQENTIEKTLKASDLIEFKFPENNLSQLTEQQINSLASFDQASAKYQFEKYVRDYTGGSLSEDNEVDFNKNTALDKNYLLNNKIPSNNVEEAGSKNYVHYIIQLQGDDISYEATCNLFSKNPKNSIIIQRNMNESAKSYFLSDDGESILELNKYRIPERLKNKEKVKVTFIGHGKDEFNTSEFARLSVDSLSNEISSFLDTIKLDISPKNVEVNLLGANMFSYDFNVEETYPGKLLLSIMDKITSTLPDVNKDSITIGANQYEVRINSEGRKELLAHSGKWINKEEAIMSDLSSKEYIFFDSIDNKLKAKSKNIPGLASISEDIKTLLLDTSVSPDTKFILNNLKLNIESSVGDYIYYEKLEPVKNIIHNSIDDLIDEFNLLENVSDELYELKKLNNLDEKYLISFEDISKNNSTYSVRFINKSNGESVYVETEKEIFSKYSEHITKEISTIKNSIITDVNGNLLDNIQLDHTSQVNTLNAAFFIQSLIDYSSNKDLLNDLSTSVKVQLYAQLFSTGLNTIYDSIQLVNLISNAVNDTINVLPTITEGIPIVSTILDGINLGAAIKELLDEHDPLLKKELEAKVGVLAINMSLSIAATVASIVGIGAEVTIFLLPIAGISAGIPSLVNNELILHDKATSVVNYFNHLSESKEYGPLKTEDDKILVPIDDLVISEIDFNNNAIKLGTCNILAMEGGSGHTVTGNIDHFFSSPSISSHIPSLSIYSAIGIKTENLDFSKKIMMLPNAPSRVFWWETGAVPGLRSLENNGTKLLDSIRDLYPGKFYWRFYAFFDYAITTLKPVYEDTNIKIKLDKDTRNFIMPTITTNEIRNKLSYSFDGAGGTYSLLLSSYPISTNINLSKDDLWIFNIDNEVREISIENGTIKKGKLIKDVLSKIDINKNKLIIGNQTIDFSGDIDNKDRYIFLTCELDDKISLIIEINLVAKSYSLLLSGDKNYLISNLSNTIEKINTLGLDSKNIAYNYTDESNNKYFGAISKTSQKSIIHYKKDSKNILEFYNGSTLEFNSKDFIAEDINVFMKDDINTITGKYYVDNNTDKSIDFSISLVSKNQAKVNGLYLNESVYSSYLDFVKNADGHHNTSNFMNLFLDNISFWKLFGFENINFVVDKYFTLVGKTNLGYVEFICDNNKNIDIYFGEWKTSSSKSTIFSGNGRNVVVEPIYNPDTGEDISTSLDFSYEPLYGIDRYINKVLIAPDLYTSLININTNYYSNEYYPEIIVLNPNTFHKKVNINLDSSSFEYKWSTEGSDFILVRYLEESNKKILQKIRIKGILSNTQSFNKMSIDFKDIKKLSLVYIMSNFKSFNSENELDRDHLGFKIIDNKTYYYDEASKLVKGLININNSLFYFDPIESNLVTGWQTINGKKYYFDINTGAALTSYKIINGKHFYFNNNGVMQLGVFKGPDRFEYFAPANTQNNNIEGQAIVYQSKFLTLNGKKYYFDNDSKAVTGWRIINNEKYYFNPNNAIAAVGLQVIDNNKYYFNPDTAIISKGWQTVNGSRYYFDTDTAIAFNGYKTIDGKHFYFDSDCVVKIGVFSGSNGFEYFAPANTYNNNIEGQAIVYQSKFLTLNGKKYYFDNNSKAVTGWQTIDSKKYYFNTNTAEAATGWQTIDGKKYYFNTNTAEAATGWQTIDGKKYYFNTNTSIASTGYTIINGKHFYFNTDGIMQIGVFKGPDGFEYFAPANTDANNIEGQAILYQNKFLTLNGKKYYFASDSKAVTGWRIINNKKYYFNPNNAIAATHLYTINNDKYYFSYDGILQNGYITIERNNFYFDANNESKMVTGVFKGPNGFEYFAPANTHNNNIEGQAIVYQNKFLTLNGKKYYFDNDSKAVTGWQTIDGKKYYFNLNTAVAVTGWQTIDGKKYYFNLNTAEAATGWQTIDGKKYYFNTNTFIASTGYTSINGKHFYFNTDGIMQIGVFKGPNGFEYFAPANTHNNNIEGQAILYQNKFLTLNGKKYYFASDSKAVTGLRTIDGKKYYFNTNTAEAATGWQTINGKKYYFNTNTSIASTGYTIINGKHFYFNTDGIMQIGVFKGPDGFEYFAPANTDANNIEGQAIRYQNRFLYLHDNIYYFGNNSKAATGWVTIDGRRYYFEPNTAIGANGYKIIDNKNFYFRNGLPQIGVFKGPNGFEYFAPANTDANNIDGQAIRYQNRFLHLLGNIYYFGNNSKAVTGWQTINGNMYYFMPDTAMAAAGGLFEIDGVIYFFGVDGVKAPGIYG

SEQ ID NO: 316 - protein, 2709 aa, Artificial Sequence; identical to SEQ ID NO: 287
  Synthetic amino acid sequence

SEQ ID NO: 317 - protein, 2709 aa, Artificial Sequence
  Synthetic amino acid sequence
SLISKEELIKLAYSIRPRENEYKTILTNLDEYNKLTTNNNENKYLQLKKLNESIDVFMNKYKNSSRNRALSNLKKDILKEVILIKNSNTSPVEKNLHFVAIGGEVSDIALEYIKQWADINAEYNIKLWYDSEAFLVNTLKKAIVESSTTEALQLLEEEIQNPQFDNMKFYKKRMEFIYDRQKRFVNYYKSQINKPTVPTIDDIIKSHLVSEYNRDETLLESYRTNSLRKINSNHGIDIRANSLFTEQELLNIYSQELLNRGNLAAASDIVRLLALKNFGGVYLDVAMLPGIHSDLFKTISRPSSIGLDRWEMIKLEAIMKYKKYINNYTSENFDKLDQQLKDNFKLIIESKSEKSEIFSKLENLNVSDLEIKIAFALGSVINQALISKQGSYLTNLVIEQVKNRYQFLNQHLNPAIESDNNFTDTTKIFHDSLFNSATAENSMFLTKIAPYLQVGFMPEARSTISLSGPGAYASAYYDFINLQENTIEKTLKASDLIEFKFPENNLSQLTEQQINSLASFDQASAKYQFEKYVRDYTGGSLSEDNEVDFNKNTALDKNYLLNNKIPSNNVEEAGSKNYVHYIIQLQGDDISYEATCNLFSKNPKNSIIIQRNMNESAKSYFLSDDGESILELNKYRIPERLKNKEKVKVTFIGHGKDEFNTSEFARLSVDSLSNEISSFLDTIKLDISPKNVEVNLLGANMFSYDFNVEETYPGKLLLSIMDKITSTLPDVNKDSITIGANQYEVRINSEGRKELLAHSGKWINKEEAIMSDLSSKEYIFFDSIDNKLKAKSKNIPGLASISEDIKTLLLDTSVSPDTKFILNNLKLNIESSVGDYIYYEKLEPVKNIIHNSIDDLIDEFNLLENVSDELYELKKLNNLDEKYLISFEDISKNNSTYSVRFINKSNGESVYVETEKEIFSKYSEHITKEISTIKNSIITDVNGNLLDNIQLDHTSQVNTLNAAFFIQSLIDYSSNKDLLNDLSTSVKVQLYAQLFSTGLNTIYDSIQLVNLISNAVNDTINVLPTITEGIPIVSTILDGINLGAAIKELLDEHDPLLKKELEAKVGVLAINMSLSIAATVASIVGIGAEVTIFLLPIAGISAGIPSLVNNELILHDKATSVVNYFNHLSESKEYGPLKTEDDKILVPIDDLVISEIDFNNNAIKLGTCNILAMEGGSGHTVTGNIDHFFSSPSISSHIPSLSIYSAIGIKTENLDFSKKIMMLPNAPSRVFWWETGAVPGLRSLENNGTKLLDSIRDLYPGKFYWRFYAFFDYAITTLKPVYEDTNIKIKLDKDTRNFIMPTITTNEIRNKLSYSFDGAGGTYSLLLSSYPISTNINLSKDDLWIFNIDNEVREISIENGTIKKGKLIKDVLSKIDINKNKLIIGNQTIDFSGDIDNKDRYIFLTCELDDKISLIIEINLVAKSYSLLLSGDKNYLISNLSNTIEKINTLGLDSKNIAYNYTDESNNKYFGAISKTSQKSIIHYKKDSKNILEFYNGSTLEFNSKDFIAEDINVFMKDDINTITGKYYVDNNTDKSIDFSISLVSKNQAKVNGLYLNESVYSSYLDFVKNADGHHNTSNFMNLFLDNISFWKLFGFENINFVVDKYFTLVGKTNLGYVEFICDNNKNIDIYFGEWKTSSSKSTIFSGNGRNVVVEPIYNPDTGEDISTSLDFSYEPLYGIDRYINKVLIAPDLYTSLININTNYYSNEYYPEIIVLNPNTFHKKVNINLDSSSFEYKWSTEGSDFILVRYLEESNKKILQKIRIKGILSNTQSFNKMSIDFKDIKKLSLVYIMSNFKSFNSENELDRDHLGFKIIDNKTYYYDEASKLVKGLININNSLFYFDPIESNLVTGWQTINGKKYYFDINTGAALTSYKIINGKHFYFNNNGVMQLGVFKGPDRFEYFAPANTQNNNIEGQAIVYQSKFLTLNGKKYYFDNDSKAVTGWRIINNEKYYFNPNNAIAAVGLQVIDNNKYYFNPDTAIISKGWQTVNGSRYYFDTDTAIAFNGYKTIDGKHFYFDSDCVVKIGVFSGSNGFEYFAPANTYNNNIEGQAIVYQSKFLTLNGKKYYFDNNSKAVTGWQTIDSKKYYFNTNTAEAATGWQTIDGKKYYFNTNTAEAATGWQTIDGKKYYFNTNTSIASTGYTIINGKHFYFNTDGIMQIGVFKGPNGFEYFAPANTDANNIEGQAILYQNKFLTLNGKKYYFASDSKAVTGWRIINNKKYYFNPNNAIAATHLYTINNDKYYFSYDGILQNGYITIERNNFYFDANNESKMVTGVFKGPNGFEYFAPANTHNNNIEGQAIVYQNKFLTLNGKKYYFDNDSKAVTGWQTIDGKKYYFNLNTAVAVTGWQTIDGKKYYFNLNTAEAATGWQTIDGKKYYFNTNTFIASTGYTSINGKHFYFNTDGIMQIGVFKGPNGFEYFAPANTHNNNIEGQAILYQNKFLTLNGKKYYFASDSKAVTGLRTIDGKKYYFNTNTAVAVTGWQTINGKKYYFNTNTSIASTGYTIISGKHFYFNTDGIMQIGVFKGPDGFEYFAPANTDANNIEGQAIRYQNRFLYLHDNIYYFGNNSKAATGWVTIDGRRYYFEPNTAIGANGYKIIDNKNFYFRNGLPQIGVFKGPNGFEYFAPANTDANNIEGQAIRYQNRFLHLLGNIYYFGNNSKAVTGWQTINGNMYYFMPDTAMAAAGGLFEIDGVIYFFGVDGVKAPGIYG

SEQ ID NO: 318 - protein, 2709 aa, Artificial Sequence
  Synthetic amino acid sequence
SLISKEELIKLAYSIRPRENEYKTILTNLDEYNKLTTNNNENKYLQLKKLNESIDVFMNKYKNSSRNRALSNLKKDILKEVILIKNSNTSPVEKNLHFVAIGGEVSDIALEYIKQWADINAEYNIKLWYDSEAFLVNTLKKAIVESSTTEALQLLEEEIQNPQFDNMKFYKKRMEFIYDRQKRFVNYYKSQINKPTVPTIDDIIKSHLVSEYNRDETLLESYRTNSLRKINSNHGIDIRANSLFTEQELLNIYSQELLNRGNLAAASDIVRLLALKNFGGVYLDVAMLPGIHSDLFKTISRPSSIGLDRWEMIKLEAIMKYKKYINNYTSENFDKLDQQLKDNFKLIIESKSEKSEIFSKLENLNVSDLEIKIAFALGSVINQALISKQGSYLTNLVIEQVKNRYQFLNQHLNPAIESDNNFTDTTKIFHDSLFNSATAENSMFLTKIAPYLQVGFMPEARSTISLSGPGAYASAYYDFINLQENTIEKTLKASDLIEFKFPENNLSQLTEQQINSLASFDQASAKYQFEKYVRDYTGGSLSEDNEVDFNKNTALDKNYLLNNKIPSNNVEEAGSKNYVHYIIQLQGDDISYEATCNLFSKNPKNSIIIQRNMNESAKSYFLSDDGESILELNKYRIPERLKNKEKVKVTFIGHGKDEFNTSEFARLSVDSLSNEISSFLDTIKLDISPKNVEVNLLGANMFSYDFNVEETYPGKLLLSIMDKITSTLPDVNKDSITIGANQYEVRINSEGRKELLAHSGKWINKEEAIMSDLSSKEYIFFDSIDNKLKAKSKNIPGLASISEDIKTLLLDTSVSPDTKFILNNLKLNIESSVGDYIYYEKLEPVKNIIHNSIDDLIDEFNLLENVSDELYELKKLNNLDEKYLISFEDISKNNSTYSVRFINKSNGESVYVETEKEIFSKYSEHITKEISTIKNSIITDVNGNLLDNIQLDHTSQVNTLNAAFFIQSLIDYSSNKDLLNDLSTSVKVQLYAQLFSTGLNTIYDSIQLVNLISNAVNDTINVLPTITEGIPIVSTILDGINLGAAIKELLDEHDPLLKKELEAKVGVLAINMSLSIAATVASIVGIGAEVTIFLLPIAGISAGIPSLVNNELILHDKATSVVNYFNHLSESKEYGPLKTEDDKILVPIDDLVISEIDFNNNAIKLGTCNILAMEGGSGHTVTGNIDHFFSSPSISSHIPSLSIYSAIGIKTENLDFSKKIMMLPNAPSRVFWWETGAVPGLRSLENNGTKLLDSIRDLYPGKFYWRFYAFFDYAITTLKPVYEDTNIKIKLDKDTRNFIMPTITTNEIRNKLSYSFDGAGGTYSLLLSSYPISTNINLSKDDLWIFNIDNEVREISIENGTIKKGKLIKDVLSKIDINKNKLIIGNQTIDFSGDIDNKDRYIFLTCELDDKISLIIEINLVAKSYSLLLSGDKNYLISNLSNTIEKINTLGLDSKNIAYNYTDESNNKYFGAISKTSQKSIIHYKKDSKNILEFYNGSTLEFNSKDFIAEDINVFMKDDINTITGKYYVDNNTDKSIDFSISLVSKNQAKVNGLYLNESVYSSYLDFVKNADGHHNTSNFMNLFLDNISFWKLFGFENINFVVDKYFTLVGKTNLGYVEFICDNNKNIDIYFGEWKTSSSKSTIFSGNGRNVVVEPIYNPDTGEDISTSLDFSYEPLYGIDRYINKVLIAPDLYTSLININTNYYSNEYYPEIIVLNPNTFHKKVNINLDSSSFEYKWSTEGSDFILVRYLEESNKKILQKIRIKGILSNTQSFNKMSIDFKDIKKLSLVYIMSNFKSFNSENELDRDHLGFKIIDNKTYYYDEASKLVKGLININNSLFYFDPIESNLVTGWQTINGKKYYFDINTGAALTSYKIINGKHFYFNNNGVMQLGVFKGPDRFEYFAPANTQNNNIEGQAIVYQSKFLTLNGKKYYFDNDSKAVTGWRIINNEKYYFNPNNAIAAVGLQVIDNNKYYFNPDTAIISKGWQTVNGSRYYFDTDTAIAFNGYKTIDGKHFYFDSDCVVKIGVFSGSNGFEYFAPANTYNNNIEGQAIVYQSKFLTLNGKKYYFDNNSKAVTGWQTIDSKKYYFNTNTAEAATGWQTIDGKKYYFNTNTAEAATGWQTIDGKKYYFNTNTSIASTGYTIINGKHFYFNTDGIMQIGVFKGPDGFEYFAPANTDANNIEGQAILYQNKFLTLNGKKYYFASDSKAVTGWRIINNKKYYFNPNNAIAATHLYTINNDKYYFSYDGILQNGYITIERNNFYFDANNESKMVTGVFKGPNGFEYFAPANTHNNNIEGQAIVYQNKFLTLNGKKYYFDNDSKAVTGWQTIDGKKYYFNLNTAVAVTGWQTIDGKKYYFNLNTAEAATGWQTIDGKKYYFNTNTFIASTGYTSINGKHFYFNTDGIMQIGVFKGPNGFEYFAPANTHNNNIEGQAILYQNKFLTLNGKKYYFASDSKAVTGLRTIDGKKYYFNTNTAVAVTGWQTINGKKYYFNTNTSIASTGYTIINGKHFYFNTDGIMQIGVFKGPDGFEYFAPANTDANNIEGQAIRYQNRFLYLHDNIYYFGNNSKAATGWVTIDGRRYYFEPNTAIGANGYKIIDNKNFYFRNGLPQIGVFKGPNGFEYFAPANTDANNIDGQAIRYQNRFLHLLGNIYYFGNNSKAVTGWQTINGNMYYFMPDTAMAAAGGLFEIDGVIYFFGVDGVKAPGIYG

SEQ ID NO: 319 - protein, 2709 aa, Artificial Sequence; identical to SEQ ID NO: 288
  Synthetic amino acid sequence

SEQ ID NO: 320 - protein, 2709 aa, Artificial Sequence
  Synthetic amino acid sequence
SLISKEELIKLAYSIRPRENEYKTILTNLDEYNKLTTNNNENKYLQLKKLNESIDVFMNKYKTSSRNRALSNLKKDILKEVILIKNSNTSPVEKNLHFVAIGGEVSDIALEYIKQWADINAEYNIKLWYDSEAFLVNTLKKAIVESSTTEALQLLEEEIQNPQFDNMKFYKKRMEFIYDRQKRFINYYKSQINKPTVPTIDDIIKSHLVSEYNRDETVLESYRTNSLRKINSNHGIDIRANSLFTEQELLNIYSQGLLNRGNLAAASDIVRLLALKNFGGVYLDVAMLPGIHSDLFKTISRPSSIGLDRWEMIKLEAIMKYKKYINNYTSENFDKLDQQLKDNFKLIIESKSEKSEIFSKLENLNVSDLEIKIAFALGSVINQALISKQGSYLTNLVIEQVKNRYQFLNQHLNPAIESDNNFTDTTKIFHDSLFNSATAENSMFLTKIAPYLQVGFMPEARSTISLSGPGAYASAYYDFINLQENTIEKTLKASDLIEFKFPENNLSQLTEQQINSLASFDQASAKYQFEKYVRDYTGGSLSEDNGVDFNKNTALDKNYLLNNKIPSNNVEEAGSKNYVHYIIQLQGDDISYEATCNLFSKNPKNSIIIQRNMNESAKSYFLSDDGESILELNKYRIPERLKNKEKVKVTFIGHGKDEFNTSEFARLSVDSLSNEISSFLDTIKLDISPKNVEVNLLGANMFSYDFNVEETYPGKLLLSIMDKITSTLPDVNKNSITIGANQYEVRINSEGRKELLAHSGKWINKEEAIMSDLSSKEYIFFDSIDNKLKAKSKNIPGLASISEDIKTLLLDASVSPDTKFILNNLKLNIESSIGDYIYYEKLEPVKNIIHNSIDDLIDEFNLLENVSDELYELKKLNNLDEKYLISFEDISKNNSTYSVRFINKSNGESVYVETEKEIFSKYSEHITKEISTIKNSIITDVNGNLLDNIQLDHTSQVNTLNAAFFIQSLIDYSSNKDVLNDLSTSVKVQLYAQLFSTGLNTIYDSIQLVNLISNAVNDTINVLPTITEGIPIVSTILDGINLGAAIKELLDEHDPLLKKELEAKVGVLAINMSLSIAATVASIVGIGAEVTIFLLPIAGISAGIPSLVNNELILHDKATSVVNYFNHLSESKKYGPLKTEDDKILVPIDDLVISEIDFNNNSIKLGTCNILAMEGGSGHTVTGNIDHFFSSPSISSHIPSLSIYSAIGIETENLDFSKKIMMLPNAPSRVFWWETGAVPGLRSLENDGTRLLDSIRDLYPGKFYWRFYAFFDYAITTLKPVYEDTNIKIKLDKDTRNFIMPTITTNEIRNKLSYSFDGAGGTYSLLLSSYPISTNINLSKDDLWIFNIDNEVREISIENGTIKKGKLIKDVLSKIDINKNKLIIGNQTIDFSGDIDNKDRYIFLTCELDDKISLIIEINLVAKSYSLLLSGDKNYLISNLSNIIEKINTLGLDSKNIAYNYTDESNNKYFGAISKTSQKSIIHYKKDSKNILEFYNDSTLEFNSKDFIAEDINVFMKDDINTITGKYYVDNNTDKSIDFSISLVSKNQVKVNGLYLNESVYSSYLDFVKNSDGHHNTSNFMNLFLDNISFWKLFGFENINFVIDKYFTLVGKTNLGYVEFICDNNKNIDIYFGEWKTSSSKSTIFSGNGRNVVVEPIYNPDTGEDISTSLDFSYEPLYGIDRYINKVLIAPDLYTSLININTNYYSNEYYPEIIVLNPNTFHKKVNINLDSSSFEYKWSTEGSDFILVRYLEESNKKILQKIRIKGILSNTQSFNKMSIDFKDIKKLSLGYIMSNFKSFNSENELDRDHLGFKIIDNKTYYYDEDSKLVKGLININNSLFYFDPIEFNLVTGWQTINGKKYYFDINTGAALISYKIINGKHFYFNNDGVMQLGVFKGPDGFEYFAPANTQNNNIEGQAIVYQSKFLTLNGKKYYFDNDSKAVTGWRIINNEKYYFNPNNAIAAVGLQVIDNNKYYFNPDTAIISKGWQTVNGSRYYFDTDTAIAFNGYKTIDGKHFYFDSDCVVKIGVFSTSNGFEYFAPANTYNNNIEGQAIVYQSKFLTLNGKKYYFDNNSKAVTGWQTIDSKKYYFNTNTAEAATGWQTIDGKKYYFNTNTAEAATGWQTIDGKKYYFNTNTAIASTGYTIINGKHFYFNTDGIMQIGVFKGPNGFEYFAPANTDANNIEGQAILYQNEFLTLNGKKYYFGSDSKAVTGWRIINNKKYYFNPNNAIAAIHLCTINNDKYYFSYDGILQNGYITIERNNFYFDANNESKMVTGVFKGPNGFEYFAPANTHNNNIEGQAIVYQNKFLTLNGKKYYFDNDSKAVTGWQTIDGKKYYFNLNTAEAATGWQTIDGKKYYFNLNTAEAATGWQTIDGKKYYFNTNTFIASTGYTSINGKHFYFNTDGIMQIGVFKGPNGFEYFAPANTHNNNIEGQAILYQNKFLTLNGKKYYFGSDSKAVTGLRTIDGKKYYFNTNTAVAVTGWQTINGKKYYFNTNTSIASTGYTIISGKHFYFNTDGIMQIGVFKGPDGFEYFAPANTDANNIEGQAIRYQNRFLYLHDNIYYFGNNSKAATGWVTIDGNRYYFEPNTAMGANGYKTIDNKNFYFRNGLPQIGVFKGSNGFEYFAPANTDANNIEGQAIRYQNRFLHLLGKIYYFGNNSKAVTGWQTINGKVYYFMPDTAMAAAGGLFEIDGVIYFFGVDGVKAPGIYG

SEQ ID NO: 321 - protein, 2709 aa, Artificial Sequence; identical to SEQ ID NO: 318
  Synthetic amino acid sequence

SEQ ID NO: 322 - protein, 2709 aa, Artificial Sequence
  Synthetic amino acid sequence
SLISKEELIKLAYSIRPRENEYKTILTNLDEYNKLTTNNNENKYLQLKKLNESIDVFMNKYKTSSRNRALSNLKKDILKEVILIKNSNTSPVEKNLHFVAIGGEVSDIALEYIKQWADINAEYNIKLWYDSEAFLVNTLKKAIVESSTTEALQLLEEEIQNPQFDNMKFYKKRMEFIYDRQKRFINYYKSQINKPTVPTIDDIIKSHLVSEYNRDETVLESYRTNSLRKINSNHGIDIRANSLFTEQELLNIYSQELLNRGNLAAASDIVRLLALKNFGGVYLDVAMLPGIHSDLFKTISRPSSIGLDRWEMIKLEAIMKYKKYINNYTSENFDKLDQQLKDNFKLIIESKSEKSEIFSKLENLNVSDLEIKIAFALGSVINQALISKQGSYLTNLVIEQVKNRYQFLNQHLNPAIESDNNFTDTTKIFHDSLFNSATAENSMFLTKIAPYLQVGFMPEARSTISLSGPGAYASAYYDFINLQENTIEKTLKASDLIEFKFPENNLSQLTEQQINSLASFDQASAKYQFEKYVRDYTGGSLSEDNGVDFNKNTALDKNYLLNNKIPSNNVEEAGSKNYVHYIIQLQGDDISYEATCNLFSKNPKNSIIIQRNMNESAKSYFLSDDGESILELNKYRIPERLKNKEKVKVTFIGHGKDEFNTSEFARLSVDSLSNEISSFLDTIKLDISPKNVEVNLLGANMFSYDFNVEETYPGKLLLSIMDKITSTLPDVNKNSITIGANQYEVRINSEGRKELLAHSGKWINKEEAIMSDLSSKEYIFFDSIDNKLKAKSKNIPGLASISEDIKTLLLDASVSPDTKFILNNLKLNIESSIGDYIYYEKLEPVKNIIHNSIDDLIDEFNLLENVSDELYELKKLNNLDEKYLISFEDISKNNSTYSVRFINKSNGESVYVETEKEIFSKYSEHITKEISTIKNSIITDVNGNLLDNIQLDHTSQVNTLNAAFFIQSLIDYSSNKDVLNDLSTSVKVQLYAQLFSTGLNTIYDSIQLVNLISNAVNDTINVLPTITEGIPIVSTILDGINLGAAIKELLDEHDPLLKKELEAKVGVLAINMSLSIAATVASIVGIGAEVTIFLLPIAGISAGIPSLVNNELILHDKATSVVNYFNHLSESKKYGPLKTEDDKILVPIDDLVISEIDFNNNSIKLGTCNILAMEGGSGHTVTGNIDHFFSSPSISSHIPSLSIYSAIGIETENLDFSKKIMMLPNAPSRVFWWETGAVPGLRSLENDGTRLLDSIRDLYPGKFYWRFYAFFDYAITTLKPVYENTNIKIKLDKDTRNFIMPTITTNEIRNKLSYSFDGAGGTYSLLLSSYPISTNINLSKDDLWIFNIDNEVREISIENGTIKKGKLIKDVLSKIDINKNKLIIGNQTIDFSGDIDNKDRYIFLTCELDDKISLIIEINLVAKSYSLLLSGDKNYLISNLSNTIEKINTLGLDSKNIAYNYTDESNNKYFGAISKTSQKSIIHYKKDSKNILEFYNDSTLEFNSKDFIAEDINVFMKDDINTITGKYYVDNNTDKSIDFSISLVSKNQVKVNGLYLNESVYSSYLDFVKNSDGHHNTSNFMNLFLDNISFWKLFGFENINFVIDKYFTLVGKTNLGYVEFICDNNKNIDIYFGEWKTSSSKSTIFSGNGRNVVVEPIYNPDTGEDISTSLDFSYEPLYGIDRYINKVLIAPDLYTSLININTNYYSNEYYPEIIVLNPNTFHKKVNINLDSSSFEYKWSTEGSDFILVRYLEESNKKILQKIRIKGILSNTQSFNKMSIDFKDIKKLSLGYIMSNFKSFNSENELDRDHLGFKIIDNKTYYYDEDSKLVKGLININNSLFYFDPIEFNLVTGWQTINGKKYYFDINTGAALTSYKIINGKHFYFNNDGVMQLGVFKGPDGFEYFAPANTQNNNIEGQAIVYQSKFLTLNGKKYYFDNDSKAVTGWRIINNEKYYFNPNNAIAAVGLQVIDNNKYYFNPDTAIISKGWQTVNGSRYYFDTDTAIAFNGYKTIDGKHFYFDSDCVVKIGVFSTSNGFEYFAPANTYNNNIEGQAIVYQSKFLTLNGKKYYFDDNSKAVTGWQTIDSKKYYFNTNTAEAATGWQTIDGKKYYFNTNTAEAATGWQTIDGKKYYFNTNTSIASTGYTSINGKHFYFNTDGIMQIGVFKGPNGFEYFAPANTDANNIEGQAILYQNEFLTLNGKKYYFGSDSKAVTGWRIINNKKYYFNPNNAIAAIHLCTINNDKYYFSYDGILQNGYITIERNNFYFDANNESKMVTGVFKGPNGFEYFAPANTHNNNIEGQAIVYQNKFLTLNGKKYYFDNDSKAVTGWQTIDGKKYYFNLNTAEAATGWQTIDGKKYYFNLNTAEAATGWQTIDGKKYYFNTNTFIASTGYTSINGKHFYFNTDGIMQIGVFKGPNGFEYFAPANTHNNNIEGQAILYQNKFLTLNGKKYYFGSDSKAVTGLRTIDGKKYYFNTNTAVAVTGWQTINGKKYYFNTNTSIASTGYTIISGKHFYFNTDGIMQIGVFKGPDGFEYFAPANTDANNIEGQAIRYQNRFLYLHDNIYYFGNNSKAATGWVTIDGNRYYFEPNTAMGANGYKTIDNKNFYFRNGLPQIGVFKGSNGFEYFAPANTDANNIEGQAIRYQNRFLHLLGKIYYFGNNSKAVTGWQTINGKVYYFMPDTAMAAAGGLFEIDGVIYFFGVDGVKAPGIYG

SEQ ID NO: 323 - protein, 2709 aa, Artificial Sequence; identical to SEQ ID NO: 210
  Synthetic amino acid sequence

SEQ ID NO: 324 - protein, 2365 aa, Artificial Sequence
  Synthetic amino acid sequence
SLVNRKQLEKMANVRFRVQEDEYVAILDALEEYHNMSENTVVEKYLKLKDINSLTDIYIDTYKKSGRNKALKKFKEYLVTEVLELKNNNLTPVEKNLHFVAIGGQINDTAINYINQWKDVNSDYNVNVFYDSNAFLINTLKKTIVESATNDTLESFRENLNDPRFDYNKFYRKRMEIIYDKQKNFINYYKTQREENPDLIIDDIVKIYLSNEYSKDIDELNSYIEESLNKVTENSGNDVRNFEEFKGGESFKLYEQELVERWNLAAASDILRISALKEVGGVYLDVAMLPGIQPDLFESIEKPSSVTVDFWEMVKLEAIMKYKEYIPGYTSEHFDMLDEEVQSSFESVLASKSDKSEIFSSLGDMEASPLEVKIAFNSKGIINQGLISVKDSYCSNLIVKQIENRYKILNNSLNPAISEDNDFNTTTNAFIDSIMAEANADNGRFMMELGKYLRVGFFPDVKTTINLSGPEAYAAAYQDLLMFKEGSMNIHLIEADLRNFEISKTNISQSTEHQMASLASFDDARAKAQFEEYKKNYFEGSLGEDDNLDFSQNTVVDKEYLLEKISSLARSSERGYIHYIVQLQGDKISYEAACNLFAKTPYDSVLFQKNIEDSEIAYYYNPGDGEIQEIDKYKIPSIISDRPKIKLTFIGHGKDEFNTDIFAGLDVDSLSTEIETAIDLAKEDISPKSIEINLLGANMFSYSVNVEETYPGKLLLRVKDKVSELMPSISQDSIIVSANQYEVRINSEGRRELLDHSGEWINKEESIIKDISSKEYISFNPKENKIIVKSKNLPELSTLLQEIRNNSNSSDIELEEKVMLAECEINVISNIDTQVVEGRIEEAKSLTSDSINYIKNEFKLIESISDALYDLKQQNELEESHFISFEDILETDEGFSIRFIDKETGESIFVETEKAIFSEYANHITEEISKIKGTIFDTVNGKLVKKVNLDATHEVNTLNAAFFIQSLIEYNSSKESLSNLSVAMKVQVYAQLFSTGLNTITDAAKVVELVSTALDETIDLLPTLSEGLPVIATIIDGVSLGAAIKELSETSDPLLRQEIEAKIGIMAVNLTAATTAIITSSLGIASGFSILLVPLAGISAGIPSLVNNELILRDKATKVVDYFSHISLAESEGAFTSLDDKIMMPQDDLVISEIDFNNNSITLGKCEIWRMEGGSGHTVTDDIDHFFSAPSITYREPHLSIYDVLEVQKEELDLSKDLMVLPNAPNRVFAWETGWTPGLRSLENDGTKLLDRIRDNYEGEFYWRYFAFIADALITTLKPRYEDTNIRINLDSNTRSFIVPVITTEYIREKLSYSFYGSGGTYALSLSQYNMNINIELNENDTWVIDVDNVVRDVTIESDKIKKGDLIENILSKLSIEDNKIILDNHEINFSGTLNGGNGFVSLTFSILEGINAVIEVDLLSKSYKVLISGELKTLMANSNSVQQKIDYIGLNSELQKNIPYSFMDDKGKENGFINCSTKEGLFVSELSDVVLISKVYMDNSKPLFGYCSNDLKDVKVITKDDVIILTGYYLKDDIKISLSFTIQDENTIKLNGVYLDENGVAEILKFMNKKGSTNTSDSLMSFLESMNIKSIFINSLQSNTKLILDTNFIISGTTSIGQFEFICDKDNNIQPYFIKFNTLETKYTLYVGNRQNMIVEPNYDLDDSGDISSTVINFSQKYLYGIDSCVNKVIISPNIYTDEINITPIYEANNTYPEVIVLDTNYISEKINININDLSIRYVWSNDGSDFILMSTDEENKVSQVKIRFTNVFKGNTISDKISFNFSDKQDVSINKVISTFTPSYYVEGLLNYDLGLISLYNEKFYINNFGMMVSGLVYINDSLYYFKPPIKNLITGFTTIGDDKYYFNPDNGGAASVGETIIDGKNYYFSQNGVLQTGVFSTEDGFKYFAPADTLDENLEGEAIDFTGKLTIDENVYYFGDNYRAAIEWQTLDDEVYYFSTDTGRAFKGLNQIGDDKFYFNSDGIMQKGFVNINDKTFYFDDSGVMKSGYTEIDGKYFYFAENGEMQIGVFNTADGFKYFAHHDEDLGNEEGEALSYSGILNFNNKIYYFDDSFTAVVGWKDLEDGSKYYFDEDTAEAYIGISIINDGKYYFNDSGIMQIGFVTINNEVFYFSDSGIVESGMQNIDDNYFYIDENGLVQIGVFDTSDGYKYFAPANTVNDNIYGQAVEYSGLVRVGEDVYYFGETYTIETGWIYDMENESDKYYFDPETKKAYKGINVIDDIKYYFDENGIMRTGLITFEDNHYYFNEDGIMQYGYLNIEDKTFYFSEDGIMQIGVFNTPDGFKYFAHQNTLDENFEGESINYTGWLDLDEKRYYFTDEYIAATGSVIIDGEEYYFDPDTAQLVISE

SEQ ID NO: 325 - protein, 2365 aa, Artificial Sequence
  Synthetic amino acid sequence
SLVNRKQLEKMANVRFRTQEDEYVAILDALEEYHNMSENTVVEKYLKLKDINSLTDIYIDTYKKSGRNKALKKFKEYLVTEVLELKNNNLTPVEKNLHFVAIGGQINDTAINYINQWKDVNSDYNVNVFYDSNAFLINTLKKTVVESAINDTLESFRENLNDPRFDYNKFFRKRMEIIYDKQKNFINYYKAQREENPELIIDDIVKTYLSNEYSKEIDELNTYIEESLNKITQNSGNDVRNFEEFKNGESFNLYEQELVERWNLAAASDILRISALKEIGGMYLDVAMLPGIQPDLFESIEKPSSVTVDFWEMTKLEAIMKYKEYIPEYTSEHFDMLDEEVQSSFESVLASKSDKSEIFSSLGDMEASPLEVKIAFNSKGIINQGLISVKDSYCSNLIVKQIENRYKILNNSLNPAISEDNDFNTTTNTFIDSIMAEANADNGRFMMELGKYLRVGFFPDVKTTINLSGPEAYAAAYQDLLMFKEGSMNIHLIEADLRNFEISKTNISQSTEHQMASLASFDDARAKAQFEEYKRNYFEGSLGEDDNLDFSQNIVVDKEYLLEKISSLARSSERGYIHYIVQLQGDKISYEAACNLFAKTPYDSVLFQKNIEDSEIAYYYNPGDGEIQEIDKYKIPSIISDRPKIKLTFIGHGKDEFNTDIFAGFDVDSLSTEIEAAIDLAKEDISPKSIEINLLGANMFSYSINVEETYPGKLLLKVKDKISELMPSISQDSIIVSANQYEVRINSEGRRELLDHSGEWINKEESIIKDISSKEYISFNPKENKITVKSKNLPELSTLLQEIRNNSNSSDIELEEKVMLTECEINVISNIDTQIVEERIEEAKNLTSDSINYIKDEFKLIESISDALCDLKQQNELEDSHFISFEDISETDEGFSIRFINKETGESIFVETEKTIFSEYANHITEEISKIKGTIFDTVNGKLVKKVNLDTTHEVNTLNAAFFIQSLIEYNSSKESLSNLSVAMKVQVYAQLFSTGLNTITDAAKVVELVSTALDETIDLLPTLSEGLPIIATIIDGVSLGAAIKELSETSDPLLRQEIEAKIGIMAVNLTTATTAIITSSLGVASGFSILLVPLAGISAGIPSLVNNELVLRDKATKVVDYFKHVSLVETEGVFTLLDDKIMMPQDDLVISEIDFNNNSIVLGKCEIWRMEGGSGHTVTDDIDHFFSAPSITYREPHLSIYDVLEVQKEELDLSKDLMVLPNAPNRVFAWETGWTPGLRSLENDGTKLLDRIRDNYEGEFYWRYFAFIADALITTLKPRYEDTNIRINLDSNTRSFIVPIITTEYIREKLSYSFYGSGGTYALSLSQYNMGINIELSESDVWIIDVDNVVRDVTIESDKIKKGDLIEGILSTLSIEENKIILNSHEINFSGEVNGSNGFVSLTFSILEGINAIIEVDLLSKSYKLLISGELKILMLNSNHIQQKIDYIGFNSELQKNIPYSFVDSEGKENGFINGSTKEGLFVSELPDVVLISKVYMDDSKPSFGYYSNNLKDVKVITKDNVNILTGYYLKDDIKISLSLTLQDEKTIKLNSVHLDESGVAEILKFMNRKGNTNTSDSLMSFLESMNIKSIFVNFLQSNIKFILDANFIISGTTSIGQFEFICDENDNIQPYFIKFNTLETNYTLYVGNRQNMIVEPNYDLDDSGDISSTVINFSQKYLYGIDSCVNKVVISPNIYTDEINITPVYETNNTYPEVIVLDANYINEKINVNINDLSIRYVWSNDGNDFILMSTSEENKVSQVKIRFVNVFKDKTLANKLSFNFSDKQDVPVSEIILSFTPSYYEDGLIGYDLGLVSLYNEKFYINNFGMMVSGLIYINDSLYYFKPPVNNLITGFVTVGDDKYYFNPINGGAASIGETIIDDKNYYFNQSGVLQTGVFSTEDGFKYFAPANTLDENLEGEAIDFTGKLIIDENIYYFDDNYRGAVEWKELDGEMHYFSPETGKAFKGLNQIGDYKYYFNSDGVMQKGFVSINDNKHYFDDSGVMKVGYTEIDGKHFYFAENGEMQIGVFNTEDGFKYFAHHNEDLGNEEGEEISYSGILNFNNKIYYFDDSFTAVVGWKDLEDGSKYYFDEDTAEAYIGLSLINDGQYYFNDDGIMQVGFVTINDKVFYFSDSGIIESGVQNIDDNYFYIDDNGIVQIGVFDTSDGYKYFAPANTVNDNIYGQAVEYSGLVRVGEDVYYFGETYTIETGWIYDMENESDKYYFNPETKKACKGINLIDDIKYYFDEKGIMRTGLISFENNNYYFNENGEMQFGYINIEDKMFYFGEDGVMQIGVFNTPDGFKYFAHQNTLDENFEGESINYTGWLDLDEKRYYFTDEYIAATGSVIIDGEEYYFDPDTAQLVISE

SEQ ID NO: 326 - protein, 2365 aa, Artificial Sequence; identical to SEQ ID NO: 324
  Synthetic amino acid sequence

SEQ ID NO: 327 - protein, 2365 aa, Artificial Sequence; identical to SEQ ID NO: 325
  Synthetic amino acid sequence

SEQ ID NO: 328 - protein, 2365 aa, Artificial Sequence
  Synthetic amino acid sequence
SLVNRKQLEKMANVRFRTQEDEYVAILDALEEYHNMSENTVVEKYLKLKDINSLTDIYIDTYKKSGRNKALKKFKEYLVTEVLELKNNNLTPVEKNLHFVAIGGQINDTAINYINQWKDVNSDYNVNVFYDSNAFLINTLKKTVVESAINDTLESFRENLNDPRFDYNKFFRKRMEIIYDKQKNFINYYKAQREENPELIIDDIVKTYLSNEYSKEIDELNTYIEESLNKITQNSGNDVRNFEEFKNGESFNLYEQELVERWNLAAASDILRISALKEIGGMYLDVAMLPGIQPDLFESIEKPSSVTVDFWEMTKLEAIMKYKEYIPEYTSEHFDMLDEEVQSSFESVLASKSDKSEIFSSLGDMEASPLEVKIAFNSKGIINQGLISVKDSYCSNLIVKQIENRYKILNNSLNPAISEDNDFNTTTNTFIDSIMAEANADNGRFMMELGKYLRVGFFPDVKTTINLSGPEAYAAAYQDLLMFKEGSMNIHLIEADLRNFEISKTNISQSTEHQMASLASFDDARAKAQFEEYKRNYFEGSLGEDDNLDFSQNIVVDKEYLLEKISSLARSSERGYIHYIVQLQGDKISYEAACNLFAKTPYDSVLFQKNIEDSEIAYYYNPGDGEIQEIDKYKIPSIISDRPKIKLTFIGHGKDEFNTDIFAGFDVDSLSTEIEAAIDLAKEDISPKSIEINLLGANMFSYSINVEETYPGKLLLKVKDKISELMPSISQDSIIVSANQYEVRINSEGRRELLDHSGEWINKEESIIKDISSKEYISFNPKENKITVKSKNLPELSTLLQEIRNNSNSSDIELEEKVMLTECEINVISNIDTQIVEERIEEAKNLTSDSINYIKDEFKLIESISDALCDLKQQNELEDSHFISFEDISETDEGFSIRFINKETGESIFVETEKTIFSEYANHITEEISKIKGTIFDTVNGKLVKKVNLDTTHEVNTLNAAFFIQSLIEYNSSKESLSNLSVAMKVQVYAQLFSTGLNTITDAAKVVELVSTALDETIDLLPTLSEGLPIIATIIDGVSLGAAIKELSETSDPLLRQEIEAKIGIMAVNLTTATTAIITSSLGIASGFSILLVPLAGISAGIPSLVNNELVLRDKATKVVDYFKHVSLVETEGVFTLLDDKIMMPQDDLVISEIDFNNNSIVLGKCEIWRMEGGSGHTVTDDIDHFFSAPSITYREPHLSIYDVLEVQKEELDLSKDLMVLPNAPNRVFAWETGWTPGLRSLENDGTKLLDRIRDNYEGEFYWRYFAFIADALITTLKPRYEDTNIRINLDSNTRSFIVPIITTEYIREKLSYSFYGSGGTYALSLSQYNMGINIELSESDVWIIDVDNVVRDVTIESDKIKKGDLIEGILSTLSIEENKIILNSHEINFSGEVNGSNGFVSLTFSILEGINAIIEVDLLSKSYKLLISGELKILMLNSNHIQQKIDYIGFNSELQKNIPYRFVDSEGKENGFINGSTKEGLFVSELPDVVLISKVYMDDSKPSFGYYSNNLKDVKVITKDNVNILTGYYLKDDIKISLSLTLQDEKTIKLNSVHLDESGVAEILKFMNRKGNTNTSDSLMSFLESMNIKSIFVNFLQSNIKFILDANFIISGTTSIGQFEFICDENDNIQPYFIKFNTLETNYTLYVGNRQNMIVEPNYDLDDSGDISSTVINFSQKYLYGIDSCVNKVVISPNIYTDEINITPVYETNNTYPEVIVLDANYINEKINVNINDLSIRYVWSNDGNDFILMSTSEENKVSQVKIRFVNVFKDKTLANKLSFNFSDKQDVPVSEIILSFTPSYYEDGLIGYDLGLVSLYNEKFYINNFGMMVSGLIYINDSLYYFKPPVNNLITGFVTVGDDKYYFNPINGGAASIGETIIDDKNYYFNQSGVLQTGVFSTEDGFKYFAPANTLDENLEGEAIDFTGKLIIDENIYYFDDNYRGAVEWKELDGEMHYFSPETGKAFKGLNQIGDDKYYFNSDGVMQKGFVSINDNKHYFDDSGVMKVGYTEIDGKHFYFAENGEMQIGVFNTEDGFKYFAHHNEDLGNEEGEEISYSGILNFNNKIYYFDDSFTAVVGWKDLEDGSKYYFDEDTAEAYIGLSLINDGQYYFNDDGIMQVGFVTINDKVFYFSDSGIIESGVQNIDDNYFYIDDNGIVQIGVFDTSDGYKYFAPANTVNDNIYGQAVEYSGLVRVGEDVYYFGETYTIETGWIYDMENESDKYYFNPETKKACKGINLIDDIKYYFDEKGIMRTGLISFENNNYYFNENGEMQFGYINIEDKMFYFGEDGVMQIGVFNTPDGFKYFAHQNTLDENFEGESINYTGWLDLDEKRYYFTDEYIAATGSVIIDGEEYYFDPDTAQLVISE

SEQ ID NO: 329 - protein, 2365 aa, Artificial Sequence
  Synthetic amino acid sequence
SLVNRKQLEKMANVRFRTQEDEYVAILDALEEYHNMSENTVVEKYLKLKDINSLTDIYIDTYKKSGRNKALKKFKEYLVTEVLELKNNNLTPVEKNLHFVAIGGQINDTAINYINQWKDVNSDYNVNVFYDSNAFLINTLKKTVVESAINDTLESFRENLNDPRFDYNKFFRKRMEIIYDKQKNFINYYKAQREENPELIIDDIVKTYLSNEYSKEIDELNTYIEESLNKITQNSGNDVRNFEEFKNGESFNLYEQELVERWNLAAASDILRISALKEIGGMYLDVAMLPGIQPDLFESIEKPSSVTVDFWEMTKLEAIMKYKEYIPEYTSEHFDMLDEEVQSSFESVLASKSDKSEIFSSLGDMEASPLEVKIAFNSKGIINQGLISVKDSYCSNLIVKQIENRYKILNNSLNPAISEDNDFNTTTNTFIDSIMAEANADNGRFMMELGKYLRVGFFPDVKTTINLSGPEAYAAAYQDLLMFKEGSMNIHLIEADLRNFEISKTNISQSTEHQMASLASFDDARAKAQFEEYKRNYFEGSLGEDDNLDFSQNIVVDKEYLLEKISSLARSSERGYIHYIVQLQGDKISYEAACNLFAKTPYDSVLFQKNIEDSEIAYYYNPGDGEIQEIDKYKIPSIISDRPKIKLTFIGHGKDEFNTDIFAGFDVDSLSTEIEAAIDLAKEDISPKSIEINLLGANMFSYSINVEETYPGKLLLKVKDKISELMPSISQDSIIVSANQYEVRINSEGRRELLDHSGEWINKEESIIKDISSKEYISFNPKENKITVKSKNLPELSTLLQEIRNNSNSSDIELEEKVMLTECEINVISNIDTQIVEERIEEAKNLTSDSINYIKDEFKLIESISDALCDLKQQNELEDSHFISFEDISETDEGFSIRFINKETGESIFVETEKTIFSEYANHITEEISKIKGTIFDTVNGKLVKKVNLDTTHEVNTLNAAFFIQSLIEYNSSKESLSNLSVAMKVQVYAQLFSTGLNTITDAAKVVELVSTALDETIDLLPTLSEGLPIIATIIDGVSLGAAIKELSETSDPLLRQEIEAKIGIMAVNLTTATTAIITSSLGIASGFSILLVPLAGISAGIPSLVNNELVLRDKATKVVDYFKHVSLVETEGVFTLLDDKIMMPQDDLVISEIDFNNNSIVLGKCEIWRMEGGSGHTVTDDIDHFFSAPSITYREPHLSIYDVLEVQKEELDLSKDLMVLPNAPNRVFAWETGWTPGLRSLENDGTKLLDRIRDNYEGEFYWRYFAFIADALITTLKPRYEDTNIRINLDSNTRSFIVPIITTEYIREKLSYSFYGSGGTYALSLSQYNMGINIELSESDVWIIDVDNVVRDVTIESDKIKKGDLIEGILSTLSIEENKIILNSHEINFSGEVNGSNGFVSLTFSILEGINAIIEVDLLSKSYKLLISGELKILMLNSNHIQQKIDYIGFNSELQKNIPYSFVDSEGKENGFINGSTKEGLFVSELPDVVLISKVYMDDSKPSFGYYSNNLKDVKVITKDNVNILTGYYLKDDIKISLSLTLQDEKTIKLNSVHLDESGVAEILKFMNRKGNTNTSDSLMSFLESMNIKSIFVNFLQSNIKFILDANFIISGTTSIGQFEFICDENDNIQPYFIKFNTLETNYTLYVGNRQNMIVEPNYDLDDSGDISSTVINFSQKYLYGIDSCVNKVVISPNIYTDEINITPVYETNNTYPEVIVLDANYINEKINVNINDLSIRYVWSNDGNDFILMSTSEENKVSQVKIRFVNVFKDKTLANKLSFNFSDKQDVPVSEIILSFTPSYYEDGLIGYDLGLVSLYNEKFYINNFGMMVSGLIYINDSLYYFKPPVNNLITGFVTVGDDKYYFNPINGGAASIGETIIDDKNYYFNQSGVLQTGVFSTEDGFKYFAPANTLDENLEGEAIDFTGKLIIDENIYYFDDNYRGAVEWKELDGEMHYFSPETGKAFKGLNQIGDDKYYFNSDGVMQKGFVSINDNKHYFDDSGVMKVGYTEIDGKHFYFAENGEMQIGVFNTEDGFKYFAHHNEDLGNEEGEEISYSGILNFNNKIYYFDDSFTAVVGWKDLEDGSKYYFDEDTAEAYIGLSLINDGQYYFNDDGIMQVGFVTINDKVFYFSDSGIIESGVQNIDDNYFYIDDNGIVQIGVFDTSDGYKYFAPANTVNDNIYGQAVEYSGLVRVGEDVYYFGETYTIETGWIYDMENESDKYYFNPETKKACKGINLIDDIKYYFDEKGIMRTGLISFENNNYYFNENGEMQFGYINIEDKMFYFGEDGVMQIGVFNTPDGFKYFAHQNTLDENFEGESINYTGWLDLDEKRYYFTDEYIAATGSVIIDGEEYYFDPDTAQLVISE

SEQ ID NO: 330 - protein, 2365 aa, Artificial Sequence
  Synthetic amino acid sequence
SLVNRKQLEKMANVRFRTQEDEYVAILDALEEYHNMSENTVVEKYLKLKDINSLTDIYIDTYKKSGRNKALKKFKEYLVTEVLELKNNNLTPVEKNLHFVAIGGQINDTAINYINQWKDVNSDYNVNVFYDSNAFLINTLKKTIVESAINDTLESFRENLNNPRFDYNKFFRKRMEIIYDKQKNFINYYKAQREENPELIIDDIVKIYLSNEYSKEIDELNTYIEESLNKIKQNSGNDVRNFEEFKNGESFKLYEQELVERWNLAAASDILRISALKEIGGMYLDVAMLPGIQPDLFESIEKPSSVTVDFWEMTKLEAIMKYKEYIPGYTSEHFDMLDEEVQSSFESALASKSDKSEIFSSLGDMEASPLEVKIAFNSKGIINQGLISVKDSYCSNLIVKQIENRYKILNNSLNPAISEDNDFNTTTNTFIDSIMAEANADNGRFMMELGKYLRVGFFPDVKTTVNLSGPEAYAAAYQDLLMFKEGSMNIHLIEADLRNFEISKTNISQSTEQQMASLATFDDARAKVQFEEYKRNYFEGSLGEDDNLDFSQNIVVDKEYLLEKISSLARSSERGYIHYIVQLQGDKISYEAACNLFAKTPYDSILFQKNIENSEVAYYYNPGDGEIQEIDKYRIPSIISDRPKIKLTFIGHGKDEFNTDIFAGLDVDSLSTEIETAIDLAKEDISSKSIEINLLGANMFSYSINVEETYPGKLLLKVKDKISELMPSISQDSIIVSANQYEVRINNEGRRELLDHSGEWINKEESIIKDISSKEYISFNPKENKITVKSKNLPELSTLLQEIRNNSNLSDIELEEKVMLAECEINVISNIDTQIVEERIEEAKNLTSDSINYIKNEFKLIESISDSLYDLKQQNELDDSHFISFEDISKTEDGFSIRFINKETGESIFVETEKEIFSEYANHIEREISNIKDTIFDTVNGKLVKKVNLDAIHEVNTLNAAFFIQSLIGYSSSKESLSNLSVAMKVQVYAQLFSTGLNTITDAAKVVELVSTALDETIDLLPTLSEGLPVIATIIDGVSLGAAIKELSETSDPLLRQEIEAKIGIMAVNLTAATTAIITSSLGIASGFSILLVPLAGISAGIPSLVNNELVLRDKATKVVDYFKHISLVETEGAFTLLDDKIMIPQDDLVISEIDFNNNSIVLGKCEIWRMEGGSGHTVTNDIDHFFSSPTITYIKPHLSIYDVLEVQKEELDLSKDLMVLPNAPNRVFAWETGWTPGLRSLENEGTKLLDRIRDHYKGEFYWRYFAFIADALITTLKPRYEDTNIRINLDSNNRSFIVPIITTEHIREKLSYSFHGSGGTYALSLSQYNMGINIELSESDVWIIDVDNVVRDVTIDSDKIKKGDLIEGILSTLSIEDNKIILNHHEINFSGDVNGSNGFISLTFSILEGINAIIEVDLLSKSYKLLISGELKILMLNSNHIQQKIDYIGFNSELQKNIPYSFVDSEGKENGFINGSTKEGLFVSELPDVVLISKVYMDDSKPSFGYYSNNLKDVKVITKDNVNILTGYYLKDDIKISLSFTLQDEKTIKLNGVHLDESGVAEILKFMNKKGSTNTSDSLMSFLESVNIKSIFVNFLQSKINFILDANFIISGTTSIGQFEFICDENDNIQPYFIKFNTLETTYTLYVGNRQNMIVEPNYDLDDSGDISSTVINFSQKYLYGIDSCVNKVVISPNIYTDEINITPVYETNNNYPEVIVLDANYINEKINVNINDLSIRYVWSNDGNDFILMSTSEENKVSQVKIRFVNVFKDKTLANKLSFNFSDKQDVPVSEIISAFTPSYYEDGLIGYDLGLVSLYNEKFYINNFGMMVSGLIYINDSLYYFKPPVNNLITGFVTVGDDKYYFNPTNGGAASIGETIINDKNYYFNQSGILQTGVFSTEDGLKYFAPANTLDENLEGEAIDFTGKLIIDENIYYFEDNYRGAVEWKELDGEMYYFSPETGKAFKGLNQIGDDKYYFNSDGIMQKGFVSINDKKYYFDDSGVMKVGYIEIDGKYFYFAENGEMQIGVFNTSDGFKYFAHHNEDLGNEEGEAISYSGILNFNNKIYYFDYSFTAVVGWKDLEDGSKYYFDEDTAEAYVGLSLINDGQYYFNDDGIMQVGFVTINNKVFYFSDSGIIESGVQNIDDNYFYIDEKGIVQIGVFDTSDEYKYFAPANTVNDNIYGQAVDYSGLVRVGEDIYYFGETYTIETGWIYDMENESDKYYFNPETKKACKGINLIDDIKYYFDENGIMRTGLISFENNDYYFNENGEMQFGYINIEDKMFYFGEDGVMQIGVFNTQDGFKYFAHQNTLDENFEGESINYTGWLDLDEKRYYFTDEYIAATGSVIIDGEEYYFDPDTAQLVISE

SEQ ID NO: 331 - protein, 2365 aa, Artificial Sequence
  Synthetic amino acid sequence
SLVNRKQLEKMANVRFRTQEDEYVAILDALEEYHNMSENTVVEKYLKLKDINSLTDIYIDTYKKSGRNKALKKFKEYLVTEVLELKNNNLTPVEKNLHFVAIGGQINDTAINYINQWKDVNSDYNVNVFYDSNAFLINTLKKTVVESAINDTLESFRENLNDPRFDYNKFFRKRMEIIYDKQKNFINYYKAQREENPELIIDDIVKTYLSNEYSKEIDELNTYIEESLNKITQNSGNDVRNFEEFKNGESFNLYEQELVERWNLAAASDILRISALKEIGGMYLDVAMLPGIQPDLFESIEKPSSVTVDFWEMTKLEAIMKYKEYIPEYTSEHFDMLDEEVQSSFESVLASKSDKSEIFSSLGDMEASPLEVKIAFNSKGIINQGLISVKDSYCSNLIVKQIENRYKILNNSLNPAISEDNDFNTTTNTFIDSIMAEANADNGRFMMELGKYLRVGFFPDVKTTINLSGPEAYAAAYQDLLMFKEGSMNIHLIEADLRNFEISKTNISQSTEQQMASLASFDDARAKAQFEEYKRNYFEGSLGEDDNLDFSQNIVVDKEYLLEKISSLARSSERGYIHYIVQLQGDKISYEAACNLFAKTPYDSVLFQKNIEDSEIAYYYNPGDGEIQEIDKYKIPSIISDRPKIKLTFIGHGKDEFNTDIFAGFDVDSLSTEIEAAIDLAKEDISPKSIEINLLGANMFSYSINVEETYPGKLLLKVKDKISELMPSISQDSIIVSANQYEVRINSEGRRELLDHSGEWINKEESIIKDISSKEYISFNPKENKITVKSKNLPELSTLLQEIRNNSNSSDIELEEKVMLTECEINVISNIDTQIVEERIEEAKNLTSDSINYIKDEFKLIESISDALCDLKQQNELEDSHFISFEDISETDEGFSIRFINKETGESIFVETEKTIFSEYANHITEEISKIKGTIFDTVNGKLVKKVNLDTTHEVNTLNAAFFIQSLIEYNSSKESLSNLSVAMKVQVYAQLFSTGLNTITDAAKVVELVSTALDETIDLLPTLSEGLPIIATIIDGVSLGAAIKELSETSDPLLRQEIEAKIGIMAVNLTTATTAIITSSLGIASGFSILLVPLAGISAGIPSLVNNELVLRDKATKVVDYFKHVSLVETEGVFTLLDDKIMMPQDDLVISEIDFNNNSIVLGKCEIWRMEGGSGHTVTDDIDHFFSAPSITYREPHLSIYDVLEVQKEELDLSKDLMVLPNAPNRVFAWETGWTPGLRSLENDGTKLLDRIRDNYEGEFYWRYFAFIADALITTLKPRYEDTNIRINLDSNTRSFIVPIITTEYIREKLSYSFYGSGGTYALSLSQYNMGINIELSESDVWIIDVDNVVRDVTIESDKIKKGDLIEGILSTLSIEENKIILNSHEINFSGEVNGSNGFVSLTFSILEGINAIIEVDLLSKSYKLLISGELKILMLNSNHIQQKIDYIGFNSELQKNIPYSFVDSEGKENGFINGSTKEGLFVSELPDVVLISKVYMDDSKPSFGYYSNNLKDVKVITKDNVNILTGYYLKDDIKISLSLTLQDEKTIKLNSVHLDESGVAEILKFMNRKGNTNTSDSLMSFLESMNIKSIFVNFLQSNIKFILDANFIISGTTSIGQFEFICDENDNIQPYFIKFNTLETNYTLYVGNRQNMIVEPNYDLDDSGDISSTVINFSQKYLYGIDSCVNKVVISPNIYTDEINITPVYETNNTYPEVIVLDANYINEKINVNINDLSIRYVWSNDGNDFILMSTSEENKVSQVKIRFVNVFKDKTLANKLSFNFSDKQDVPVSEIILSFTPSYYEDGLIGYDLGLVSLYNEKFYINNFGMMVSGLIYINDSLYYFKPPVNNLITGFVTVGDDKYYFNPINGGAASIGETIIDDKNYYFNQSGVLQTGVFSTEDGFKYFAPANTLDENLEGEAIDFTGKLIIDENIYYFDDNYRGAVEWKELDGEMHYFSPETGKAFKGLNQIGDDKYYFNSDGVMQKGFVSINDNKHYFDDSGVMKVGYTEIDGKHFYFAENGEMQIGVFNTEDGFKYFAHHNEDLGNEEGEEISYSGILNFNNKIYYFDDSFTAVVGWKDLEDGSKYYFDEDTAEAYIGLSLINDGQYYFNDDGIMQVGFVTINDKVFYFSDSGIIESGVQNIDDNYFYIDDNGIVQIGVFDTSDGYKYFAPANTVNDNIYGQAVEYSGLVRVGEDVYYFGETYTIETGWIYDMENESDKYYFNPETKKACKGINLIDDIKYYFDEKGIMRTGLISFENNNYYFNENGEMQFGYINIEDKMFYFGEDGVMQIGVFNTPDGFKYFAHQNTLDENFEGESINYTGWLDLDEKRYYFTDEYIAATGSVIIDGEEYYFDPDTAQLVISE

SEQ ID NO: 332 - protein, 2365 aa, Artificial Sequence; identical to SEQ ID NO: 330
  Synthetic amino acid sequence

SEQ ID NO: 333 - protein, 2365 aa, Artificial Sequence; identical to SEQ ID NO: 220
  Synthetic amino acid sequence

SEQ ID NO: 334 - protein, 2365 aa, Artificial Sequence
  Synthetic amino acid sequence
SLVNRKQLEKMANVRFRTQEDEYVAILDALEEYHNMSENTVVEKYLKLKDINSLTDIYIDTYKKSGRNKALKKFKEYLVTEVLELKNNNLTPVEKNLHFVAIGGQINDTAINYINQWKDVNSDYNVNVFYDSNAFLINTLKKTVVESAINDTLESFRENLNDPRFDYNKFFRKRMEIIYDKQKNFINYYKAQREENPELIIDDIVKTYLSNEYSKEIDELNTYIEESLNKITQNSGNDVRNFEEFKNGESFNLYEQELVERWNLAAASDILRISALKEIGGMYLDVAMLPGIQPDLFESIEKPSSVTVDFWEMTKLEAIMKYKEYIPEYTSEHFDMLDEEVQSSFESVLASKSDKSEIFSSLGDMEASPLEVKIAFNSKGIINQGLISVKDSYCSNLIVKQIENRYKILNNSLNPAISEDNDFNTTTNTFIDSIMAEANADNGRFMMELGKYLRVGFFPDVKTTINLSGPEAYAAAYQDLLMFKEGSMNIHLIEADLRNFEIFKTNISQSTEQQMASLASFDDARAKAQFEEYKRNYFEGSLGEDDNLDFSQNIVVDKEYLLEKISSLARSSERGYIHYIVQLQGDKISYEAACNLFAKTPYDSVLFQKNIEDSEIAYYYNPGDGEIQEIDKYKIPSIISDRPKIKLTFIGHGKDEFNTDIFAGFDVDSLSTEIEAAIDLAKEDISPKSIEINLLGANMFSYSINVEETYPGKLLLKVKDKISELMPSISQDSIIVSANQYEVRINSEGRRELLDHSGEWINKEESIIKDISSKEYISFNPKENKITVKSKNLPELSTLLQEIRNNSNSSDIELEEKVMLTECEINVISNIDTQIVEERIEEAKNLTSDSINYIKDEFKLIESISDALCDLKQQNELEDSHFISFEDISETDEGFSIRFINKETGESIFVETEKTIFSEYANHITEEISKIKGTIFDTVNGKLVKKVNLDTTHEVNTLNAAFFIQSLIEYNSSKESLSNLSVAMKVQVYAQLFSTGLNTITDAAKVVELVSTALDETIDLLPTLSEGLPIIATIIDGVSLGAAIKELSETSDPLLRQEIEAKIGIMAVNLTTATTAIITSSLGIASGFSILLVPLAGISAGIPSLVNNELVLRDKATKVVDYFKHVSLVETEGVFTLLDDKIMMPQDDLVISEIDFNNNSIVLGKCEIWRMEGGSGHTVTDDIDHFFSAPSITYREPHLSIYDVLEVQKEELDLSKDLMVLPNAPNRVFAWETGWTPGLRSLENDGTKLLDRIRDNYEGEFYWRYFAFIADALITTLKPRYEDTNIRINLDSNTRSFIVPIITTEYIREKLSYSFYGSGGTYALSLSQYNMGINIELSESDVWIIDVDNVVRDVTIESDKIKKGDLIEGILSTLSIEENKIILNSHEINFSGEVNGSNGFVSLTFSILEGINAIIEVDLLSKSYKLLISGELKILMLNSNHIQQKIDYIGFNSELQKNIPYSFVDSEGKENGFINGSTKEGLFVSELPDVVLISKVYMDDSKPSFGYYSNNLKDVKVITKDNVNILTDYYLKDDIKISLSLTLQDEKTIKLNSVHLDESGVAEILKFMNRKGNTNTSDSLMSFLESMNIKSIFVNFLQSNIKFILDANFIISGTTSIGQFEFICDENDNIQPYFIKFNTLETNYTLYVGNRQNMIVEPNYDLDDSGDISSTVINFSQKYLYGIDSCVNKVVISPNIYTDEINITPVYETNNTYPEVIVLDANYINEKINVNINDLSIRYVWSNDGNDFILMSTSEENKVSQVKIRFVNVFKDKTLANKLSFNFSDKQDVPVSEIILSFTPSYYEDGLIGYDLGLVSLYNEKFYINNFGMMVSGLIYINDSLYYFKPPVNNLITGFVTVGDDKYYFNPINGGAASIGETIIDDKNYYFNQSGVLQTGVFSTEDGFKYFAPANTLDENLEGEAIDFTGKLIIDENIYYFDDNYRGAVEWKELDGEMHYFSPETGKAFKGLNQIGDYKYYFNSDGVMQKGFVSINDNKHYFDDSGVMKVGYTEIDGKHFYFAENGEMQIGVFNTEDGFKYFAHHNEDLGNEEGEEISYSGILNFNNKIYYFDDSFTAVVGWKDLEDGSKYYFDEDTAEAYIGLSLINDGQYYFNDDGIMQVGFVTINDKVFYFSDSGIIESGVQNIDDNYFYIDDNGIVQIGVFDTSDGYKYFAPANTVNDNIYGQAVEYSGLVRVGEDVYYFGETYTIETGWIYDMENESDKYYFNPETKKACKGINLIDDIKYYFDEKGIMRTGLISFENNNYYFNENGEMQFGYINIEDKMFYFGEDGVMQIGVFNTPDGFKYFAHQNTLDENFEGESINYTGWLDLDEKRYYFTDEYIAATGSVIIDGEEYYFDPDTAQLVISE

SEQ ID NO: 335 - protein, 2366 aa, Artificial Sequence
  Synthetic amino acid sequence
SLVNRKQLEKMANVRFRVQEDEYVAILDALEEYHNMSENTVVEKYLKLKDINSLTDTYIDTYKKSGRNKALKKFKEYLVIEILELKNSNLTPVEKNLHFIAIGGQINDTAINYINQWKDVNSDYNVNVFYDSNAFLINTLKKTIIESASNDTLESFRENLNDPEFNHTAFFRKRMQIIYDKQQNFINYYKAQKEENPDLIIDDIVKTYLSNEYSKDIDELNAYIEESLNKVTENSGNDVRNFEEFKTGEVFNLYEQELVERWNLAGASDILRVAILKNIGGVYLDVAMLPGIHPDLFKDINKPDSVKTAVDWEEMQLEAIMKHKEYIPEYTSKHFDTLDEEVQSSFESVLASKSDKSEIFLPLGDIEVSPLEVKIAFAKGSIINQALISAKDSYCSDLLIKQIQNRYKILNDTLGPIISQGNDFNTTMNNFGESLGAIANEENISFIAKIGSYLRVGFYPEANTTITLSGPTIYAGAYKDLLTFKEMSIDTSILSSELRNFEFPKVNISQATEQQKNSLAQFNEERAKIQFEEYKKNYFEGALGEDDNLDFSQNTVTDKEYLLEKISSSTKSSERGYVHYIVQLQGDKISYEAACNLFAKNPYDSILFQKNIEDSEVAYYYNPTDSEIQEIDKYRIPDRISDRPKIKLTFIGHGKAEFNTDIFAGLDVDSLSSEIETAIGLAKEDISPKSIEINLLGANMFSYSVNVEETYPGKLLLRVKDKVSELMPSMSQDSIIVSANQYEVRINSEGRRELLDHSGEWINKEESIIKDISSKEYISFNPKENKIIVKSKNLPELSTLLQEIRNNSNSSDIELEEKVMLAECEINVISNIETQVVEERIEEAKSLTSDSINYIKNEFKLIESISDALCDLKQQNELEDSHFISFEDISETDEGFSIRFINKETGESIFVETEKTIFSEYANHITEEISKIKGTIFDTVNGKLVKKVNLDTTHEVNTLNAAFFIQSLIEYNSSKESLSNLSVAMKVQVYAQLFSTGLNTITDAAKVVELVSTALDETIDLLPTLSEGLPIIATIIDGVSLGAAIKELSETSDPLLRQEIEAKIGIMAVNLTTATTAIITSSLGIASGFSILLVPLAGISAGIPSLVNNELVLRDKATKVVDYFKHVSLVETEGVFTLLDDKVMMPQDDLVISEIDFNNNSIVLGKCEIWRMEGGSGHTVTDDIDHFFSAPSITYREPHLSIYDVLEVQKEELDLSKDLMVLPNAPNRVFAWETGWTPGLRSLENDGTKLLDRIRDNYEGEFYWRYFAFIADALITTLKPRYEDTNIRINLDSNTRSFIVPIITTEYIREKLSYSFYGSGGTYALSLSQYNMGINIELSESDVWIIDVDNVVRDVTIESDKIKKGDLIEGILSTLSIEENKIILNSHEINFSGEVNGSNGFVSLTFSILEGINAIIEVDLLSKSYKLLISGELKILMLNSNHIQQKIDYIGFNSELQKNIPYSFVDSEGKENGFINGSTKEGLFVSELPDVVLISKVYMDDSKPSFGYYSNNLKDVKVITKDNVNILTGYYLKDDIKISLSLTLQDEKTIKLNSVHLDESGVAEILKFMNRKGSTNTSDSLMSFLESMNIKSIFVNFLQSNIKFILDANFIISGTTSIGQFEFICDENNNIQPYFIKFNTLETNYTLYVGNRQNMIVEPNYDLDDSGDISSTVINFSQKYLYGIDSCVNKVVISPNIYTDEINITPVYETNNTYPEVIVLDANYINEKINVNINDLSIRYVWSNDGNDFILMSTSEENKVSQVKIRFVNVFKDKTLANKLSFNFSDKQDVPVSEIILSFTPSYYEDGLIGYDLGLVSLYNEKFYINNFGMMVSGLIYINDSLYYFKPPVNNLITGFVTVGDDKYYFNPINGGAASIGETIIDDKNYYFNQSGVLQTGVFSTEDGFKYFAPANTLDENLEGEAIDFTGKLIIDENIYYFEDNYRGAVEWKELDGEMHYFSPETGKAFKGLNQIGDDKYYFNSDGVMQKGFVSINDNKHYFDDSGVMKVGYTEIDGKHFYFAENGEMQIGVFNTEDGFKYFAHHNEDLGNEEGEEISYSGILNFNNKIYYFDDSFTAVVGWKDLEDGSKYYFDEDTAEAYIGLSLINDGQYYFNDDGIMQVGFVTINDKVFYFSDSGIIESGVQNIDDNYFYIDDNGIVQIGVFDTSDGYKYFAPANTVNDNIYGQAVEYSGLVRVGEDVYYFGETYTIETGWIYDMENESDKYYFDPETKKACKGINLIDDIKYYFDEKGIMRTGLISFENNNYYFNENGEMQFGYINIEDKMFYFGEDGVMQIGVFNTPDGFKYFAHQNTLDENFEGESINYTGWLDLDEKRYYFTDEYIAATGSVIIDGEEYYFDPDTAQLVISE

SEQ ID NO: 336 - protein, 2365 aa, Artificial Sequence
  Synthetic amino acid sequence
SLVNRKQLEKMANVRFRTQEDEYVAILDALEEYHNMSENTVVEKYLKLKDINSLTDIYIDTYKKSGRNKALKKFKEYLVTEVLELKNNNLTPVEKNLHFVAIGGQINDTAINYINQWKDVNSDYNVNVFYDSNAFLINTLKKTVVESAINDTLESFRENLNDPRFDYNKFFRKRMEIIYDKQKNFINYYKAQREENPELIIDDIVKTYLSNEYSKEIDELNTYIEESLNKITQNSGNDVRNFEEFKNGESFNLYEQELVERWNLAAASDILRISALKEIGGMYLDVAMLPGIQPDLFESIEKPSSVTVDFWEMTKLEAIMKYKEYIPEYTSEHFDMLDEEVQSSFESVLASKSDKSEIFSSLGDMEASPLEVKIAFNSKGIINQGLISVKDSYCSNLIVKQIENRYKILNNSLNPAISEDNDFNTTTNTFIDSIMAEANADNGRFMMELGKYLRVGFFPDVKTTINLSGPEAYAAAYQDLLMFKEGSMNIHLIEADLRNFEISKTNISQSTEQQMASLASFDDARAKAQFEEYKRNYFEGSLGEDDNLDFSQNIVVDKEYLLEKISSLARSSERGYIHYIVQLQGDKISYEAACNLFAKTPYDSVLFQKNIEDSEIAYYYNPGDGEIQEIDKYKIPSIISDRPKIKLTFIGHGKDEFNTDIFAGFDVDSLSTEIEAAIDLAKEDISPKSIEINLLGANMFSYSINVEETYPGKLLLKVKDKISELMPSISQDSIIVSANQYEVRINSEGRRELLDHSGEWINKEESIIKDISSKEYISFNPKENKITVKSKNLPELSTLLQEIRNNSNSSDIELEEKVMLTECEINVISNIDTQIVEERIEEAKNLTSDSINYIKDEFKLIESISDALCDLKQQNELEDSHFISFEDISETDEGFSIRFINKETGESIFVETEKTIFSEYANHITEEISKIKGTIFDTVNGKLVKKVNLDTTHEVNTLNAAFFIQSLIEYNSSKESLSNLSVAMKVQVYAQLFSTGLNTITDAAKVVELVSTALDETIDLLPTLSEGLPIIATIIDGVSLGAAIKELSETSDPLLRQEIEAKIGIMAVNLTTATTAIITSSLGVASGFSILLVPLAGISAGIPSLVNNELVLRDKATKVVDYFKHVSLVETEGVFTLLDDKIMMPQDDLVISEIDFNNNSIVLGKCEIWRMEGGSGHTVTDDIDHFFSAPSITYREPHLSIYDVLEVQKEELDLSKDLMVLPNAPNRVFAWETGWTPGLRSLENDGTKLLDRIRDNYEGEFYWRYFAFIADALITTLKPRYEDTNIRINLDSNTRSFIVPIITTEYIREKLSYSFYGSGGTYALSLSQYNMGINIELSESDVWIIDVDNVVRDVTIESDKIKKGDLIEGILSTLSIEENKIILNSHEINFSGEVNGSNGFVSLTFSILEGINAIIEVDLLSKSYKLLISGELKILMLNSNHIQQKIDYIGFNSELQKNIPYSFVDSEGKENGFINGSTKEGLFVSELPDVVLISKVYMDDSKPSFGYYSNNLKDVKVITKDNVNILTGYYLKDDIKISLSLTLQDEKTIKLNSVHLDESGVAEILKFMNRKGNTNTSDSLMSFLESMNIKSIFVNFLQSNIKFILDANFIISGTTSIGQFEFICDENDNIQPYFIKFNTLETNYTLYVGNRQNMIVEPNYDLDDSGDISSTVINFSQKYLYGIDSCVNKVVISPNIYTDEINITPVYETNNTYPEVIVLDANYINEKINVNINDLSIRYVWSNDGNDFILMSTSEENKVSQVKIRFVNVFKDKTLANKLSFNFSDKQDVPVSEIILSFTPSYYEDGLIGYDLGLVSLYNEKFYINNFGMMVSGLIYINDSLYYFKPPVNNLITGFVTVGDDKYYFNPINGGAASIGETIIDDKNYYFNQSGVLQTGVFSTEDGFKYFAPANTLDENLEGEAIDFTGKLIIDENIYYFDDNYRGAVEWKELDGEMHYFSPETGKAFKGLNQIGDYKYYFNSDGVMQKGFVSINDNKHYFDDSGVMKVGYTEIDGKHFYFAENGEMQIGVFNTEDGFKYFAHHNEDLGNEEGEEISYSGILNFNNKIYYFDDSFTAVVGWKDLEDGSKYYFDEDTAEAYIGLSLINDGQYYFNDDGIMQVGFVTINDKVFYFSDSGIIESGVQNIDDNYFYIDDNGIVQIGVFDTSDGYKYFAPANTVNDNIYGQAVEYSGLVRVGEDVYYFGETYTIETGWIYDMENESDKYYFNPETKKACKGINLIDDIKYYFDEKGIMRTGLISFENNNYYFNENGEMQFGYINIEDKMFYFGEDGVMQIGVFNTPDGFKYFAHQNTLDENFEGESINYTGWLDLDEKRYYFTDEYIAATGSVIIDGEEYYFDPDTAQLVISE

SEQ ID NO: 337 - protein, 2365 aa, Artificial Sequence; identical to SEQ ID NO: 330
  Synthetic amino acid sequence

SEQ ID NO: 338 - protein, 2365 aa, Artificial Sequence; identical to SEQ ID NO: 331
  Synthetic amino acid sequence

SEQ ID NO: 339 - protein, 2365 aa, Artificial Sequence; identical to SEQ ID NO: 330
  Synthetic amino acid sequence

SEQ ID NO: 340 - protein, 2366 aa, Artificial Sequence
  Synthetic amino acid sequence
SLVNRKQLEKMANVRFRVQEDEYVAILDALEEYHNMSENTVVEKYLKLKDINSLTDTYIDTYKKSGRNKALKKFKEYLVTEILELKNSNLTPVEKNLHFIAIGGQINDTAINYINQWKDVNSDYNVNVFYDSNAFLINTLKKTIIESASNDTLESFRENLNDPEFNHTAFFRKRMQIIYDKQQNFINYYKAQKEENPDLIIDDIVKTYLSNEYSKDIDELNAYIEESLNKVTENSGNDVRNFEEFKTGEVFNLYEQELVERWNLAGASDILRVAILKNIGGVYLDVAMLPGIHPDLFKDINKPDSVKTAVDWEEMQLEAIMKYKEYIPEYTSKHFDTLDEEVQSSFESVLASKSDKSEIFLPLGDIEVSPLEVKIAFAKGSIINQALISAKDSYCSDLLIKQIQNRYKILNDTLGPIISQGNDFNTTMNNFGESLGAIANEENISFIAKIGSYLRVGFYPEANTTITLSGPTIYAGAYKDLLTFKEMSIDTSILSSELRNFEFPKVNISQATEQQKNSLAQFNEERAKIQFEEYKKNYFEGALGEDDNLDFSQNTVIDKEYLLEKISSSTKSSERGYVHYIVQLQGDKISYEAACNLFAKNPYDSILFQKNIEDSEVAYYYNPTDSEIQEIDKYRIPDRISDRPKIKLTLIGHGKAEFNTDIFAGLDVDSLSSEIETIIDLAKADISPKSIEINLLGANMFSYSVNVEETYPGKLLLRVKDKVSELMPSISQDSIIVSANQYEVRINSEGRRELLDHSGEWINKEESIIKDISSKEYISFNPKENKIIVKSKNLPELSTLLQEIRNNSNSSDIELEEKVMLAECEINVISNIETQVVEERIEEAKSLTSDSINYIKNEFKLIESISDALYDLKQQNELEESHFISFEDISETDEGFSIRFIDKETGESIFVETEKAIFSEYANHITEEISKIKGTIFDTVNGKLVKKVNLDATHEVNTLNAAFFIQSLIEYNSSKESLSNLSVAMKVQVYAQLFSTGLNTITDAAKVVELVSTALDETIDLLPTLSEGLPVIATIIDGVSLGAAIKELSETSDPLLRQEIEAKIGIMAVNLTAATTAIITSSLGIASGFSILLVPLAGISAGIPSLVNNELILRDKATKVVDYFSHISLAESEGAFTSLDDKIMMPQDDLVISEIDFNNNSITLGKCEIWRMEGGSGHTVTDDIDHFFSSPSITYREPHLSIYDVLEVKKEELDLSKDLMVLPNAPNRVFGWETGWTPGLRGLENDGTKLLDRIRDQYEGQFYWRFFAFIADALITTLKPRYEDTNVRISLDSNTRSFIVPVITTEYIREKLSYSFYGSGGTYALSLSQYNMNINIELNENDTWVIDVDNVVRSVTIESDKIKKGDLIENILSKLSIEDNKIILDNHEINFSGTLNGGNGFVSLTFSILEGINAVIEVDLLSKSYKVLISGELKTLMANSNSVQQKIDYIGLNSELQKNIPYSFMDDKGKENGFINCSTKEGLFVSELSDVVLIIKVYMDNSKPPFGYYSNDLKDVKAITKDDVIILTGYYLKDDIKISLSFTIQDKNTIKLNGVYLDENGVAEILKFMNKKGSTNTSDSLMSFLESMNIKSIFIKSLKSNAKLILDTNFIISGTTSIGQFEFICDKDNNIQPYFIKFNTLETKYTLYVGNRQNMIVEPNYDLDDSGDISSTVINFSQKYLYGIDSCVNKVIISPNIYTDEINITPIYEANNTYPEVIVLDTNYISEKINININDLSIRYVWSNDGSDFILMSTDEENKVSQVKIRFTNVFKGNTISDKISFNFSDKQDVSINKIISTFTPSYYVEGLLNYHLGLISLYNEKFYINNFGMMVSGLVYINDSLYYFKPPIKNLITGFTTIGDDKYYFNPDNGGAASVGETIIDGKNYYFSPNGVLQTGVFSTEDGFKYFAPADTLDENLEGEAIDFTGKLIIDENVYYFGDNYRAAIEWQTLDDEVYYFSTDTGRAFKGLNQIGDDKFYFNSDGIMQKGFVNINDKTFYFDDSGVMKSGYTEIDGKHFYFAENGEMQIGVFNTADGFKYFAHHDEDLGNEEGEALSYSGILNFNNKIYYFDDSFTAVVGWKDSEDGSKYYFDEDTAEAYIGISTINDGKYYFNDSGIMQIGFVTINNEVFYFSDSGIVESGMQNIDDNYFYIDENGLVQIGVFDTSDGYKYFAPANTVNDNIYGQAVEYSGLVRVGEDVYYFGETYTIETGWIYDMENESDKYYFDPETKKAYKGINVIDDIKYYFDENGIMRTGLITFEDNHYYFNEDGIMQYGYINIEDKMFYFNEDGVMQIGVFNTADGFKYFAHQNTLDENFEGESINYTGWLDLDEKRYYFTDEYIAAIGSVIIDGEEYYFDPDTAELVISE

SEQ ID NO: 341 - protein, 2366 aa, Artificial Sequence; identical to SEQ ID NO: 340
  Synthetic amino acid sequence

SEQ ID NO: 342 - protein, 2366 aa, Artificial Sequence
  Synthetic amino acid sequence
SLVNRKQLEKMANVRFRVQEDEYVAILDALEEYHNMSENTVVEKYLKLKDINSLTDTYIDTYKKSGRNKALKKFKEYLVTEILELKNSNLTPVEKNLHFIAIGGQINDTAINYINQWKDVNSDYNVNVFYDSNAFLINTLKKTIIESASNDTLESFRENLNDPEFNHTAFFRKRMQIIYDKQQNFINYYKAQKEENPDLIIDDIVKTYLSNEYSKDIDELNAYIEESLNKVTENSGNDVRNFEEFKTGEVFNLYEQELVERWNLAGASDILRVAILKNIGGVYLDVAMLPGIHPDLFKDINKPDSVKTAVDWEEMQLEAIMKYKEYIPEYTSKHFDTLDEEVQSSFESVLASKSDKSEIFLPLGDIEVSPLEVKIAFAKGSIINQALISAKDSYCSDLLIKQIQNRYKILNDTLGPIISQGNDFNTTMNNFGESLGAIANEENISFIAKIGSYLRVGFYPEANTTITLSGPTIYAGAYKDLLTFKEMSIDTSILSSELRNFEFPKVNISQATEQQKNSLAQFNEERAKIQFEEYKKNYFEGALGEDDNLDFSQNTVIDKEYLLEKISSSTKSSERGYVHYIVQLQGDKISYEAACNLFAKNPYDSILFQKNIEDSEVAYYYNPTDSEIQEIDKYRIPDRISDRPKIKLTLIGHGKAEFNTDIFAGLDVDSLSSEIETIIDLAKADISPKSIEINLLGANMFSYSVNVEETYPGKLLLRVKDKVSELMPSISQDSIIVSANQYEVRINSEGRRELLDHSGEWINKEESIIKDISSKEYISFNPKENKIIVKSKNLPELSTLLQEIRNNSNSSDIELEEKVMLAECEINVISNIETQVVEERIEEAKSLTSDSINYIKNEFKLIESISDALYDLKQQNELEESHFISFEDISETDEGFSIRFIDKETGESIFVETEKAIFSEYANHITEEISKIKGTIFDTVNGKLVKKVNLDATHEVNTLNAAFFIQSLIEYNSSKESLSNLSVAMKVQVYAQLFSTGLNTITDAAKVVELVSTALDETIDLLPTLSEGLPVIATIIDGVSLGAAIKELSETSDPLLRQEIEAKIGIMAVNLTAATTAIITSSLGIASGFSILLVPLAGISAGIPSLVNNELILRDKATKVVDYFSHISLAESEGAFTSLDDKIMMPQDDLVISEIDFNNNSITLGKCEIWRMEGGSGHTVTDDIDHFFSSPSITYREPHLSIYDVLEVKKEELDLSKDLMVLPNAPNRVFGWETGWTPGLRGLENDGTKLLDRIRDQYEGQFYWRFFAFIADALITTLKPRYEDTNVRISLDSNTRSFIVPVITTEYIREKLSYSFYGSGGTYALSLSQYNMNINIELNENDTWVIDVDNVVRSVTIESDKIKKGDLIENILSKLSIEDNKIILDNHEINFSGTLNGGNGFVSLTFSILEGINAVIEVDLLSKSYKVLISGELKTLMANSNSVQQKIDYIGLNSELQKNIPYSFMDDKGKENGFINCSTKDGLFVSELSDVVLIIKVYMDNSKPPFGYYSNDLKDVKAITKDDVIILTGYYLKDDIKISLSFTIQDKNTIKLNGVYLDENGVAEILKFMNKKGSTNTSDSLMSFLESMNIKSIFIKSLKSNAKLILDTNFIISGTTSIGQFEFICDKDNNIQPYFIKFNTLETKYTLYVGNRQNMIVEPNYDLDDSGDISSTVINFSQKYLYGIDSCVNKVIISPNIYTDEINITPIYEANNTYPEVIVLDTNYISEKINININDLSIRYVWSNDGSDFILMSTDEENKVSQVKIRFTNVFKGNTISDKISFNFSDKQDVSINKIISTFTPSYYVEGLLNYHLGLISLYNEKFYINNFGMMVSGLVYINDSLYYFKPPIKNLITGFTTIGDDKYYFNPDNGGAASVGETIIDGKNYYFSPNGVLQTGVFSTEDGFKYFAPADTLDENLEGEAIDFTGKLIIDENVYYFGDNYRAAIEWQTLDDEVYYFSTDTGRAFKGLNQIGDDKFYFNSDGIMQKGFVNINDKTFYFDDSGVMKSGYTEIDGKHFYFAENGEMQIGVFNTADGFKYFAHHDEDLGNEEGEALSYSGILNFNNKIYYFDDSFTAVVGWKDSEDGSKYYFDEDTAEAYIGISTINDGKYYFNDSGIMQIGFVTINNEVFYFSDSGIVESGMQNIDDNYFYIDENGLVQIGVFDTSDGYKYFAPANTVNDNIYGQAVEYSGLVRVGEDVYYFGETYTIETGWIYDMENESDKYYFDPETKKAYKGINVIDDIKYYFDENGIMRTGLITFEDNHYYFNEDGIMQYGYINIEDKMFYFNEDGVMQIGVFNTADGFKYFAHQNTLDENFEGESINYTGWLDLDEKRYYFTDEYIAAIGSVIIDGEEYYFDPDTAELVISE

SEQ ID NO: 343 - protein, 2365 aa, Artificial Sequence; identical to SEQ ID NO: 336
  Synthetic amino acid sequence

SEQ ID NO: 344 - protein, 2365 aa, Artificial Sequence; identical to SEQ ID NO: 331
  Synthetic amino acid sequence

SEQ ID NO: 345 - protein, 2365 aa, Artificial Sequence
  Synthetic amino acid sequence
SLVNRKQLEKMANVRFRTQEDEYVAILDALEEYHNMSENTVVEKYLKLKDINSLTDIYIDTYKKSGRNKALKKFKEYLVTEVLELKNNNLTPVEKNLHFVAIGGQINDTAINYINQWKDVNSDYNVNVFYDSNAFLINTLKKTVVESAINDTLESFRENLNDPRFDYNKFFRKRMEIIYDKQKNFINYYKAQREENPELIIDDIVKTYLSNEYSKEIDELNTYIEESLNKITQNSGNDVRNFEEFKNGESFNLYEQELVERWNLAAASDILRISALKEIGGMYLDVAMLPGIQPDLFESIEKPSSVTVDFWEMTKLEAIMKYKEYIPEYTSEHFDMLDEEVQSSFESVLASKSDKSEIFSSLGDMEASPLEVKIAFNSKGIINQGLISVKDSYCSNLIVKQIENRYKILNNSLNPAISEDNDFNTTTNTFIDSIMAEANADNGRFMMELGKYLRVGFFPDVKTTINLSGPEAYAAAYQDLLMFKEGSMNIHLIEADLRNFEISKTNISQSTEQQMASLASFDDARAKAQFEEYKRNYFEGSLGEDDNLDFSQNIVVDKEYLLEKISSLARSSERGYIHYIVQLQGDKISYEAACNLFAKTPYDSVLFQKNIEDSEIAYYYNPGDGEIQEIDKYKIPSIISDRPKIKLTFIGHGKDEFNTDIFAGFDVDSLSTEIEAAIDLAKEDISPKSIEINLLGANMFSYSINVEETYPGKLLLKVKDKISELMPSISQDSIIVSANQYEVRINSEGRRELLDHSGEWINKEESIIKDISSKEYISFNPKENKITVKSKNLPELSTLLQEIRNNSNSSDIELEEKVMLTECEINVISNIDTQIVEERIEEAKNLTSDSINYIKDEFKLIESISDALCDLKQQNELEDSHFISFEDISETDEGFSIRFINKETGESIFVETEKTIFSEYANHITEEISKIKGTIFDTVNGKLVKKVNLDTTHEVNTLNAAFFIQSLIEYNSSKESLSNLSVAMKVQVYAQLFSTGLNTITDAAKVVELVSTALDETIDLLPTLSEGLPIIATIIDGVSLGAAIKELSETSDPLLRQEIEAKIGIMAVNLTTATTAIITSSLGIASGFSILLVPLAGISAGIPSLVNNELVLRDKATKVVDYFKHVSLVETEGVFTLLDDKIMMPQDDLVISEIDFNNNSIVLGKCEIWRMEGGSGHTVTDDIDHFFSAPSITYREPHLSIYDVLEVQKEELDLSKDLMVLPNAPNRVFAWETGWTPGLRSLENDGTKLLDRIRDNYEGEFYWRYFAFIADALITTLKPRYEDTNIRINLDSNTRSFIVPIITTEYIREKLSYSFYGSGGTYALSLSQYNMGINIELSESDVWIIDVDNVVRDVTIESDKIKKGDLIEGILSTLSIEENKIILNSHEINFSGEVNGSNGFVSLTFSILEGINAIIEVDLLSKSYKLLISGELKILMLNSNHIQQKIDYIGFNSELQKNIPYSFVDSEGKENGFINGSTKEGLFVSELPDVVLISKVYMDDSKPSFGYYSNNLKDVKVITKDNVNILTGYYLKDDIKISLSLTLQDEKTIKLNSVHLDESGVAEILKFMNRKGNTNTSDSLMSFLESMNIKSIFVNFLQSNIKFILDANFIISGTTSIGQFEFICDENDNIQPYFIKFNTLETNYTLYVGNRQNMIVEPNYDLDDSGDISSTVINFSQKYLYGIDSCVNKVVISPNIYTDEINITPVYETNNTYPEVIVLDANYINEKINVNINDLSIRYVWSNDGNDFILMSTSEENKVSQVKIRFVNVFKDKTLANKLSFNFSDKQDVPVSEIILSFTPSYYEDGLIGYDLGLVSLYNEKFYINNFGMMLSGLIYINDSLYYFKPPVNNLITGFVTVGDDKYYFNPINGGAASIGETIIDDKNYYFNQSGVLQTGVFSTEDGFKYFAPANTLDENLEGEAIDFTGKLIIDENIYYFDDNYRGAVEWKELDGEMHYFSPETGKAFKGLNQIGDDKYYFNSDGVMQKGFVSINDNKHYFDDSGVMKVGYTEIDGKHFYFAENGEMQIGVFNTEDGFKYFAHHNEDLGNEEGEEISYSGILNFNNKIYYFDDSFTAVVGWKDLEDGSKYYFDEDTAEAYIGLSLINDGQYYFNDDGIMQVGFVTINDKVFYFSDSGIIESGVQNIDDNYFYIDDNGIVQIGVFDTSDGYKYFAPANTVNDNIYGQAVEYSGLVRVGEDVYYFGETYTIETGWIYDMENESDKYYFNPETKKACKGINLIDDIKYYFDEKGIMRTGLISFENNNYYFNENGEMQFGYINIEDKMFYFGEDGVMQIGVFNTPDGFKYFAHQNTLDENFEGESINYTGWLDLDEKRYYFTDEYIAATGSVIIDGEEYYFDPDTAQLVISE

SEQ ID NO: 346 - protein, 2365 aa, Artificial Sequence; identical to SEQ ID NO: 336
  Synthetic amino acid sequence

SEQ ID NO: 347 - protein, 2365 aa, Artificial Sequence; identical to SEQ ID NO: 220
  Synthetic amino acid sequence

SEQ ID NO: 348 - protein, 2365 aa, Artificial Sequence; identical to SEQ ID NO: 336
  Synthetic amino acid sequence

SEQ ID NO: 349 - protein, 2365 aa, Artificial Sequence; identical to SEQ ID NO: 336
  Synthetic amino acid sequence

SEQ ID NO: 350 - protein, 2365 aa, Artificial Sequence
  Synthetic amino acid sequence
SLVNRKQLEKMANVRFRTQEDEYVAILDALEEYHNMSENTVVEKYLKLKDINSLTDIYIDTYKKSGRNKALKKFKEYLVTEVLELKNNNLTPVEKNLHFVAIGGQINDTAINYINQWKDVNSDYNVNVFYDSNAFLINTLKKTVVESAINDTLESFRENLNDPRFDYNKFFRKRMEIIYDKQKNFINYYKAQREENPELIIDDIVKTYLSNEYSKEIDELNTYIEESLNKITQNSGNDVRNFEEFKNGESFNLYEQELVERWNLAAASDILRISALKEIGGMYLDVAMLPGIQPGLFESIEKPSSVTVDFWEMTKLEAIMKYKEYIPEYTSEHFDMLDEEVQSSFESVLASKSDKSEIFSSLGDMEASPLEVKIAFNSKGIINQGLISVKDSYCSNLIVKQIENRYKILNNSLNPAISEDNDFNTTTNTFIDSIMAEANADNGRFMMELGKYLRVGFFPDVKTTINLSGPEAYAAAYQDLLMFKEGSMNIHLIEADLRNFEISKTNISQSTEQQMASLASFDDARAKAQFEEYKRNYFEGSLGEDDNLDFSQNIVVDKEYLLEKISSLARSSERGYIHYIVQLQGDKISYEAACNLFAKTPYDSVLFQKNIEDSEIAYYYNPGDGEIQEIDKYKIPSIISDRPKIKLTFIGHGKDEFNTDIFAGFDVDSLSTEIEAAIDLAKEDISPKSIEINLLGANMFSYSINVEETYPGKLLLKVKDKISELMPSISQDSIIVSANQYEVRINSEGRRELLDHSGEWINKEESIIKDISSKEYISFNPKENKITVKSKNLPELSTLLQEIRNNSNSSDIELEEKVMLTECEINVISNIDTQIVEERIEEAKNLTSDSINYIKDEFKLIESISDALCDLKQQNELEDSHFISFEDISETDEGFSIRFINKETGESIFVETEKTIFSEYANHITEEISKIKGTIFDTVNGKLVKKVNLDTTHEVNTLNAAFFIQSLIEYNSSKESLSNLSVAMKVQVYAQLFSTGLNTITDAAKVVELVSTALDETIDLLPTLSEGLPIIATIIDGVSLGAAIKELSETSDPLLRQEIEAKIGIMAVNLTTATTAIITSSLGVASGFSILLVPLAGISAGIPSLVNNELVLRDKATKVVDYFKHVSLVETEGVFTLLDDKIMMPQDDLVISEIDFNNNSIVLGKCEIWRMEGGSGHTVTDDIDHFFSAPSITYREPHLSIYDVLEVQKEELDLSKDLMVLPNAPNRVFAWETGWTPGLRSLENDGTKLLDRIRDNYEGEFYWRYFAFIADALITTLKPRYEDTNIRINLDSNTRSFIVPIITTEYIREKLSYSFYGSGGTYALSLSQYNMGINIELSESDVWIIDVDNVVRDVTIESDKIKKGDLIEGILSTLSIEENKIILNSHEINFSGEVNGSNGFVSLTFSILEGINAIIEVDLLSKSYKLLISGELKILMLNSNHIQQKIDYIGFNSELQKNIPYSFVDSEGKENGFINGSTKEGLFVSELPDVVLISKVYMDDSKPSFGYYSNNLKDVKVITKDNVNILTGYYLKDDIKISLSLTLQDEKTIKLNSVHLDESGVAEILKFMNRKGNTNTSDSLMSFLESMNIKSIFVNFLQSNIKFILDANFIISGTTSIGQFEFICDENDNIQPYFIKFNTLETNYTLYVGNRQNMIVEPNYDLDDSGDISSTVINFSQKYLYGIDSCVNKVVISPNIYTDEINITPVYETNNTYPEVIVLDANYINEKINVNINDLSIRYVWSNDGNDFILMSTSEENKVSQVKIRFVNVFKDKTLANKLSFNFSDKQDVPVSEIILSFTPSYYEDGLIGYDLGLVSLYNEKFYINNFGMMVSGLIYINDSLYYFKPPVNNLITGFVTVGDDKYYFNPINGGAASIGETIIDDKNYYFNQSGVLQTGVFSTEDGFKYFAPANTLDENLEGEAIDFTGKLIIDENIYYFDDNYRGAVEWKELDGEMHYFSPETGKAFKGLNQIGDYKYYFNSDGVMQKGFVSINDNKHYFDDSGVMKVGYTEIDGKHFYFAENGEMQIGVFNTEDGFKYFAHHNEDLGNEEGEEISYSGILNFNNKIYYFDDSFTAVVGWKDLEDGSKYYFDEDTAEAYIGLSLINDGQYYFNDDGIMQVGFVTINDKVFYFSDSGIIESGVQNIDDNYFYIDDNGIVQIGVFDTSDGYKYFAPANTVNDNIYGQAVEYSGLVRVGEDVYYFGETYTIETGWIYDMENESDKYYFNPETKKACKGINLIDDIKYYFDEKGIMRTGLISFENNNYYFNENGEMQFGYINIEDKMFYFGEDGVMQIGVFNTPDGFKYFAHQNTLDENFEGESINYTGWLDLDEKRYYFTDEYIAATGSVIIDGEEYYFDPDTAQLVISE

SEQ ID NO: 351 - protein, 2365 aa, Artificial Sequence; identical to SEQ ID NO: 350
  Synthetic amino acid sequence

SEQ ID NO: 352 - protein, 2365 aa, Artificial Sequence; identical to SEQ ID NO: 336
  Synthetic amino acid sequence

SEQ ID NO: 353 - protein, 2365 aa, Artificial Sequence
  Synthetic amino acid sequence
SLVNRKQLEKMANVRFRTQEDEYVAILDALEEYHNMSENTVVEKYLKLKDINSLTDIYIDTYKKSGRNKALKKFKEYLVTEVLELKNNNLTPVEKNLHFVAIGGQINDTAINYINQWKDVNSDYNVNVFYDSNAFLINTLKKTVVESAINDTLESFRENLNDPRFDYNKFFRKRMEIIYDKQKNFINYYKAQREENPELIIDDIVKTYLSNEYSKEIDELNTYIEESLNKITQNSGNDVRNFEEFKNGESFNLYEQELVERWNLAAASDILRISALKEIGGMYLDVAMLPGIQPDLFESIEKPSSVTVDFWEMTKLEAIMKYKEYIPEYTSEHFDMLDEEVQSSFESVLASKSDKSEIFSSLGDMEASPLEVKIAFNSKGIINQGLISVKDSYCSNLIVKQIENRYKILNNSLNPAISEDNDFNTTTNTFIDSIMAEANADNGRFMMELGKYLRVGFFPDVKTTINLSGPEAYAAAYQDLLMFKEGSMNIHLIEADLRNFEISKTNISQSTEQQMASLASFDDARAKAQFEEYKRNYFEGSLGEDDNLDFSQNIVVDKEYLLEKISSLARSSERGYIHYIVQLQGDKISYEAACNLFAKTPYDSVLFQKNIEDSEIAYYYNPGDGEIQEIDKYKIPSIISDRPKIKLTFIGHGKDEFNTDIFAGFDVDSLSTEIEAAIDLAKEDISPKSIEINLLGANMFSYSINVEETYPGKLLLKVKDKISELMPSISQDSIIVSANQYEVRINSEGRRELLDHSGEWINKEESIIKDISSKEYISFNPKENKITVKSKNLPELSTLLQEIRNNSNSSDIELEEKVMLTECEINVISNIDTQIVEERIEEAKNLTSDSINYIKDEFKLIESISDALCDLKQQNELEDSHFISFEDISETDEGFSIRFINKETGESIFVETEKTIFSEYANHITEEISKIKGTIFDTVNGKLVKKVNLDTTHEVNTLNAAFFIQSLIEYNSSKESLSNLSVAMKVQVYAQLFSTGLNTITDAAKVVELVSTALDETIDLLPTLSEGLPIIATIIDGVSLGAAIKELSETSDPLLRQEIEAKIGIMAVNLTTATTAIITSSLGVASGFSILLVPLAGISAGIPSLVNNELVLRDKATKVVDYFKHVSLVETEGVFTLLDDKIMMPQDDLVISEIDFNNNSIVLGKCEIWRMEGGSGHTVTDDIDHFFSAPSITYREPHLSIYDVLEVQKEELDLSKDLMVLPNAPNRVFAWETGWTPGLRSLENDGTKLLDRIRDNYEGEFYWRYFAFIADALITTLKPRYEDTNIRINLDSNTRSFIVPIITTEYIREKLSYSFYGSGGTYALSLSQYNMGINIELSESDVWIIDVDNVVRDVTIESDKIKKGDLIEGILSTLSIEENKIILNSHEINFSGEVNGSNGFVSLTFSILEGINAIIEVDLLSKSYKLLISGELKILMLNSNHIQQKIDYIGFNSELQKNIPYSFVDSEGKENGFINGSTKEGLFVSELPDVVLISKVYMDDSKPSFGYYSNNLKDVKVITKDNVNILTGYYLKDDIKISLSLTLQDEKTIKLNSVHLDESGVAEILKFMNRKGSTNTSDSLMSFLESMNIKSIFVNFLQSNIKFILDANFIISGTTSIGQFEFICDENDNIQPYFIKFNTLETNYTLYVGNRQNMIVEPNYDLDDSGDISSTVINFSQKYLYGIDSCVNKVVISPNIYTDEINITPVYETNNTYPEVIVLDANYINEKINVNINDLSIRYVWSNDGNDFILMSTSEENKVSQVKIRFVNVFKDKTLANKLSFNFSDKQDVPVSEIILSFTPSYYEDGLIGYDLGLVSLYNEKFYINNFGMMVSGLIYINDSLYYFKPPVNNLITGFVTVGDDKYYFNPINGGAASIGETIIDDKNYYFNQSGVLQTGVFSTEDGFKYFAPANTLDENLEGEAIDFTGKLIIDENIYYFDDNYRGAVEWKELDGEMHYFSPETGKAFKGLNQIGDDKYYFNSDGVMQKGFVSINDNKHYFDDSGVMKVGYTEIDGKHFYFAENGEMQIGVFNTEDGFKYFAHHNEDLGNEEGEEISYSGILNFNNKIYYFDDSFTAVVGWKDLEDGSKYYFDEDTAEAYIGLSLINDGQYYFNDDGIMQVGFVTINDKVFYFSDSGIIESGVQNIDDNYFYIDDNGIVQIGVFDTSDGYKYFAPANTVNDNIYGQAVEYSGLVRVGEDVYYFGETYTIETGWIYDMENESDKYYFNPETKKACKGINLIDDIKYYFDEKGIMRTGLISFENNNYYFNENGEMQFGYINIEDKMFYFGEDGVMQIGVFNTPDGFKYFAHQNTLDENFEGESINYTGWLDLDEKRYYFTDEYIAATGSVIIDGEEYYFDPDTAQLVISE

SEQ ID NO: 354 - protein, 2366 aa, Artificial Sequence; identical to SEQ ID NO: 335
  Synthetic amino acid sequence

SEQ ID NO: 355 - protein, 2365 aa, Artificial Sequence
  Synthetic amino acid sequence
SLVNRKQLEKMANVRFRTQEDEYVAILDALEEYHNMSENTVVEKYLKLKDINSLTDIYIDTYKKSGRNKALKKFKEYLVTEVLELKNNNLTPVEKNLHFVAIGGQINDTAINYINQWKDVNSDYNVNVFYDSNAFLINTLKKTVVESAINDTLESFRENLNDPRFDYNKFFRKRMEIIYDKQKNFINYYKAQREENPELIIDDIVKTYLSNEYSKEIDELNTYIEESLNKITQNSGNDVRNFEEFKNGESFNLYEQELVERWNLAAASDILRISALKEIGGMYLDVAMLPGIQPDLFESIEKPSSVTVDFWEMTKLEAIMKYKEYIPEYTSEHFDMLDEEVQSSFESVLASKSDKSEIFSSLGDMEASPLEVKIAFNSKGIINQGLISVKDSYCSNLIVKQIENRYKILNNSLNPAISEDNDFNTTTNTFIDSIMAEANADNGRFMMELGKYLRVGFFPDVKTTINLSGPEAYAAAYQDLLMFKEGSMNIHLIEADLRNFEISKTNISQSTEQQMASLASFDDSRAKAQFEEYKRNYFEGSLGEDDNLDFSQNIVVDKEYLLEKISSLARSSERGYIHYIVQLQGDKISYEAACNLFAKTPYDSVLFQKNIEDSEIAYYYNPGDGEIQEIDKYKIPSIISDRPKIKLTFIGHGKDEFNTDIFAGFDVDSLSTEIEAAIDLAKEDISPKSIEINLLGANMFSYSINVEETYPGKLLLKVKDKISELMPSISQDSIIVSANQYEVRINSEGRRELLDHSGEWINKEESIIKDISSKEYISFNPKENKITVKSKNLPELSTLLQEIRNNSNSSDIELEEKVMLTECEINVISNIDTQIVEERIEEAKNLTSDSINYIKDEFKLIESISDALCDLKQQNELEDSHFISFEDISETDEGFSIRFINKETGESIFVETEKTIFSEYANHITEEISKIKGTIFDTVNGKLVKKVNLDTTHEVNTLNAAFFIQSLIEYNSSKESLSNLSVAMKVQVYAQLFSTGLNTITDAAKVVELVSTALDETIDLLPTLSEGLPIIATIIDGVSLGAAIKELSETSDPLLRQEIEAKIGIMAVNLTTATTAIITSSLGVASGFSILLVPLAGISAGIPSLVNNELVLRDKATKVVDYFKHVSLVETEGVFTLLDDKIMMPQDDLVISEIDFNNNSIVLGKCEIWRMEGGSGHTVTDDIDHFFSAPSITYREPHLSIYDVLEVQKEELDLSKDLMVLPNAPNRVFAWETGWTPGLRSLENDGTKLLDRIRDNYEGEFYWRYFAFIADALITTLKPRYEDTNIRINLDSNTRSFIVPIITTEYIREKLSYSFYGSGGTYALSLSQYNMGINIELSESDVWIIDVDNVVRDVTIESDKIKKGDLIEGILSTLSIEENKIILNSHEINFSGEVNGSNGFVSLTFSILEGINAIIEVDLLSKSYKLLISGELKILMLNSNHIQQKIDYIGFNSELQKNIPYSFVDSEGKENGFINGSTKEGLFVSELPDVVLISKVYMDDSKPSFGYYSNNLKDVKVITKDNVNILTGYYLKDDIKISLSLTLQDEKTIKLNSVHLDESGVAEILKFMNRKGSTNTSDSLMSFLESMNIKSIFVNFLQSNIKFILDANFIISGTTSIGQFEFICDENDNIQPYFIKFNTLETNYTLYVGNRQNMIVEPNYDLDDSGDISSTVINFSQKYLYGIDSCVNKVVISPNIYTDEINITPVYETNNTYPEVIVLDANYINEKINVNINDLSIRYVWSNDGNDFILMSTSEENKVSQVKIRFVNVFKDKTLANKLSFNFSDKQDVPVSEIILSFTPSYYEDGLIGYDLGLVSLYNEKFYINNFGMMVSGLIYINDSLYYFKPPVNNLITGFVTVGDDKYYFNPINGGAASIGETIIDDKNYYFNQSGVLQTGVFSTEDGFKYFAPANTLDENLEGEAIDFTGKLIIDENIYYFDDNYRGAVEWKELDGEMHYFSPETGKAFKGLNQIGDDKYYFNSDGVMQKGFVSINDNKHYFDDSGVMKVGYTEIDGKHFYFAENGEMQIGVFNTEDGFKYFAHHNEDLGNEEGEEISYSGILNFNNKIYYFDDSFTAVVGWKDLEDGSKYYFDEDTAEAYIGLSLINDGQYYFNDDGIMQVGFVTINDKVFYFSDSGIIESGVQNIDDNYFYIDDNGIVQIGVFDTSDGYKYFAPANTVNDNIYGQAVEYSGLVRVGEDVYYFGETYTIETGWIYDMENESDKYYFNPETKKACKGINLIDDIKYYFDEKGIMRTGLISFENNNYYFNENGEMQFGYINIEDKMFYFGEDGVMQIGVFNTPDGFKYFAHQNTLDENFEGESINYTGWLDLDEKRYYFTDEYIAATGSVIIDGEEYYFDPDTAQLVISE

SEQ ID NO: 356 - protein, 2365 aa, Artificial Sequence; identical to SEQ ID NO: 355
  Synthetic amino acid sequence

SEQ ID NO: 357 - protein, 2365 aa, Artificial Sequence; identical to SEQ ID NO: 355
  Synthetic amino acid sequence

SEQ ID NO: 358 - protein, 2365 aa, Artificial Sequence
  Synthetic amino acid sequence
SLVNRKQLEKMANVRFRTQEDEYVAILDALEEYHNMSENTVVEKYLKLKDINSLTDIYIDTYKKSGRNKALKKFKEYLVTEVLELKNNNLTPVEKNLHFVAIGGQINDTAINYINQWKDVNSDYNVNVFYDSNAFLINTLKKTVVESAINDTLESFRENLNDPRFDYNKFFRKRMEIIYDKQKNFINYYKAQREENPELIIDDIVKTYLSNEYSKEIDELNTYIEESLNKITQNSGNDVRNFEEFKNGESFNLYEQELVERWNLAAASDILRISALKEIGGMYLDVAMLPGIQPDLFESIEKPSSVTVDFWEMTKLEAIMKYKEYIPEYTSEHFDMLDEEVQSSFESVLASKSDKSEIFSSLGDMEASPLEVKIAFNSKGIINQGLISVKDSYCSNLIVKQIENRYKILNNSLNPAISEDNDFNTTTNTFIDSIMAEANADNGRFMMELGKYLRVGFFPDVKTTINLSGPEAYAAAYQDLLMFKEGSMNIHLIEADLRNFEIFKTNISQSTEQQMASLASFDDSRAKAQFEEYKRNYFEGSLGEDDNLDFSQNIVVDKEYLLEKISSLARSSERGYIHYIVQLQGDKISYEAACNLFAKTPYDSVLFQKNIEDSEIAYYYNPGDGEIQEIDKYKIPSIISDRPKIKLTFIGHGKDEFNTDIFAGFDVDSLSTEIEAAIDLAKEDISPKSIEINLLGANMFSYSINVEETYPGKLLLKVKDKISELMPSISQDSIIVSANQYEVRINSEGRRELLDHSGEWINKEESIIKDISSKEYISFNPKENKITVKSKNLPELSTLLQEIRNNSNSSDIELEEKVMLTECEINVISNIDTQIVEERIEEAKNLTSDSINYIKDEFKLIESISDALCDLKQQNELEDSHFISFEDISETDEGFSIRFINKETGESIFVETEKTIFSEYANHITEEISKIKGTIFDTVNGKLVKKVNLDTTHEVNTLNAAFFIQSLIEYNSSKESLSNLSVAMKVQVYAQLFSTGLNTITDAAKVVELVSTALDETIDLLPTLSEGLPIIATIIDGVSLGAAIKELSETSDPLLRQEIEAKIGIMAVNLTTATTAIITSSLGVASGFSILLVPLAGISAGIPSLVNNELVLRDKATKVVDYFKHVSLVETEGVFTLLDDKIMMPQDDLVISEIDFNNNSIVLGKCEIWRMEGGSGHTVTDDIDHFFSAPSITYREPHLSIYDVLEVQKEELDLSKDLMVLPNAPNRVFAWETGWTPGLRSLENDGTKLLDRIRDNYEGEFYWRYFAFIADALITTLKPRYEDTNIRINLDSNTRSFIVPIITTEYIREKLSYSFYGSGGTYALSLSQYNMGINIELSESDVWIIDVDNVVRDVTIESDKIKKGDLIEGILSTLSIEENKIILNSHEINFSGEVNGSNGFVSLTFSILEGINAIIEVDLLSKSYKLLISGELKILMLNSNHIQQKIDYIGFNSELQKNIPYSFVDSEGKENGFINGSTKEGLFVSELPDVVLISKVYMDDSKPSFGYYSNNLKDVKVITKDNVNILTGYYLKDDIKISLSLTLQDEKTIKLNSVHLDESGVAEILKFMNRKGSTNTSDSLMSFLESMNIKSIFVNFLQSNIKFILDANFIISGTTSIGQFEFICDENDNIQPYFIKFNTLETNYTLYVGNRQNMIVEPNYDLDDSGDISSTVINFSQKYLYGIDSCVNKVVISPNIYTDEINITPVYETNNTYPEVIVLDANYINEKINVNINDLSIRYVWSNDGNDFILMSTSEENKVSQVKIRFVNVFKDKTLANKLSFNFSDKQDVPVSEIILSFTPSYYEDGLIGYDLGLVSLYNEKFYINNFGMMVSGLIYINDSLYYFKPPVNNLITGFVTVGDDKYYFNPINGGAASIGETIIDDKNYYFNQSGVLQTGVFSTEDGFKYFAPANTLDENLEGEAIDFTGKLIIDENIYYFDDNYRGAVEWKELDGEMHYFSPETGKAFKGLNQIGDDKYYFNSDGVMQKGFVSINDNKHYFDDSGVMKVGYTEIDGKHFYFAENGEMQIGVFNTEDGFKYFAHHNEDLGNEEGEEISYSGILNFNNKIYYFDDSFTAVVGWKDLEDGSKYYFDEDTAEAYIGLSLINDGQYYFNDDGIMQVGFVTINDKVFYFSDSGIIESGVQNIDDNYFYIDDNGIVQIGVFDTSDGYKYFAPANTVNDNIYGQAVEYSGLVRVGEDVYYFGETYTIETGWIYDMENESDKYYFNPETKKACKGINLIDDIKYYFDEKGIMRTGLISFENNNYYFNENGEMQFGYINIEDKMFYFGEDGVMQIGVFNTPDGFKYFAHQNTLDENFEGESINYTGWLDLDEKRYYFTDEYIAATGSVIIDGEEYYFDPDTAQLVISE

SEQ ID NO: 359 - protein, 2365 aa, Artificial Sequence; identical to SEQ ID NO: 358
  Synthetic amino acid sequence

SEQ ID NO: 360 - protein, 2365 aa, Artificial Sequence; identical to SEQ ID NO: 331
  Synthetic amino acid sequence

SEQ ID NO: 361 - protein, 2365 aa, Artificial Sequence
  Synthetic amino acid sequence
SLVNRKQLEKMANVRFRTQEDEYVAILDALEEYHNMSENTVVEKYLKLKDINSLTDIYIDTYKKSGRNKALKKFKEYLVTEVLELKNNNLTPVEKNLHFVAIGGQINDTAINYINQWKDVNSDYNVNVFYDSNAFLINTLKKTVVESAINDTLESFRENLNDPRFDYNKFFRKRMEIIYDKQKNFINYYKAQREENPELIIDDIVKTYLSNEYSKEIDELNTYIEESLNKITQNSGNDVRNFEEFKNGESFNLYEQELVERWNLAAASDILRISALKEIGGMYLDVAMLPGIQPDLFESIEKPSSVTVDFWEMTKLEAIMKYKEYIPEYTSEHFDMLDEEVQSSFESVLASKSDKSEIFSSLGDMEASPLEVKIAFNSKGIINQGLISVKDSYCSNLIVKQIENRYKILNNSLNPAISEDNDFNTTTNTFIDSIMAEANADNGRFMMELGKYLRVGFFPDVKTTINLSGPEAYAAAYQDLLMFKEGSMNIHLIEADLRNFEISKTNISQSTEQQMASLASFDDARAKAQFEEYKRNYFEGSLGEDDNLDFSQNIVVDKEYLLEKISSLARSSERGYIHYIVQLQGDKISYEAACNLFAKTPYDSVLFQKNIEDSEIAYYYNPGDGEIQEIDKYKIPSIISDRPKIKLTFIGHGKDEFNTDIFAGFDVDSLSTEIEAAIDLAKEDISPKSIEINLLGANMFSYSINVEETYPGKLLLKVKDKISELMPSISQDSIIVSANQYEVRINSEGRRELLDHSGEWINKEESIIKDISSKEYISFNPKENKITVKSKNLPELSTLLQEIRNNSNSSDIELEEKVMLTECEINVISNIDTQIVEERIEEAKNLTSDSINYIKDEFKLIESISDALCDLKQQNELEDSHFISFEDISETEEGFSIRFINKETGESIFVETEKTIFSEYANHITEEISKIKGTIFDTVNGKLVKKVNLDTTHEVNTLNAAFFIQSLIEYNSSKESLSNLSVAMKVQVYAQLFSTGLNTITDAAKVVELVSTALDETIDLLPTLSEGLPIIATIIDGVSLGAAIKELSETSDPLLRQEIEAKIGIMAVNLTTATTAIITSSLGIASGFSILLVPLAGISAGIPSLVNNELVLRDKATKVVDYFKHVSLVETEGVFTLLDDKIMMPQDDLVISEIDFNNNSIVLGKCEIWRMEGGSGHTVTDDIDHFFSAPSITYREPHLSIYDVLEVQKEELDLSKDLMVLPNAPNRVFAWETGWTPGLRSLENDGTKLLDRIRDNYEGEFYWRYFAFIADALITTLKPRYEDTNIRINLDSNTRSFIVPIITTEYIREKLSYSFYGSGGTYALSLSQYNMGINIELSESDVWIIDVDNVVRDVTIESDKIKKGDLIEGILSTLSIEENKIILNSHEINFSGEVNGSNGFVSLTFSILEGINAIIEVDLLSKSYKLLISGELKILMLNSNHIQQKIDYIGFNSELQKNIPYSFVDSEGKENGFINGSTKEGLFVSELPDVVLISKVYMDDSKPSFGYYSNNLKDVKVITKDNVNILTGYYLKDDIKISLSLTLQDEKTIKLNSVHLDESGVAEILKFMNRKGNTNTSDSLMSFLESMNIKSIFVNFLQSNIKFILDANFIISGTTSIGQFEFICDENDNIQPYFIKFNTLETNYTLYVGNRQNMIVEPNYDLDDSGDISSTVINFSQKYLYGIDSCVNKVVISPNIYTDEINITPVYETNNTYPEVIVLDANYINEKINVNINDLSIRYVWSNDGNDFILMSTSEENKVSQVKIRFVNVFKDKTLANKLSFNFSDKQDVPVSEIILSFTPSYYEDGLIGYDLGLVSLYNEKFYINNFGMMVSGLIYINDSLYYFKPPVNNLITGFVTVGDDKYYFNPINGGAASIGETIIDDKNYYFNQSGVLQTGVFSTEDGFKYFAPANTLDENLEGEAIDFTGKLIIDENIYYFEDNYRGAVEWKELDGEMHYFSPETGKAFKGLNQIGDDKYYFNSDGVMQKGFVSINDNKHYFDDSGVMKVGYTEIDGKYFYFAENGEMQIGVFNTEDGFKYFAHHNEDLGNEEGEEISYSGILNFNNKIYYFDDSFTAVVGWKDLEDGSKYYFDEDTAEAYIGLSLINDGQYYFNDDGIMQVGFVTINDKVFYFSDSGIIESGVQNIDDNYFYIDDNGIVQIGVFDTSDGYKYFAPANTVNDNIYGQAVEYSGLVRVGEDVYYFGETYTIETGWIYDMENESDKYYFNPETKKACKGINLIDDIKYYFDEKGIMRTGLISFENNNYYFNENGEMQFGYINIEDKMFYFGEDGVMQIGVFNTPDGFKYFAHQNTLDENFEGESINYTGWLDLDEKRYYFTDEYIAATGSVIIDGEEYYFDPDTAQLVISE

SEQ ID NO: 362 - protein, 2365 aa, Artificial Sequence; identical to SEQ ID NO: 350
  Synthetic amino acid sequence

SEQ ID NO: 363 - protein, 2365 aa, Artificial Sequence
  Synthetic amino acid sequence
SLVNRKQLEKMANVRFRTQEDEYVAILDALEEYHNMSENTVVEKYLKLKDINSLTDIYIDTYKKSGRNKALKKFKEYLVTEVLELKNNNLTPVEKNLHFVAIGGQINDTAINYINQWKDVNSDYNVNVFYDSNAFLINTLKKTIVESAINDTLESFRENLNNPRFDYNKFFRKRMEIIYDKQKNFINYYKAQREENPELIIDDIVKIYLSNEYSKEIDELNTYIEESLNKIKQNSGNDVRNFEEFKNGESFKLYEQELVERWNLAAASDILRISALKEIGGMYLDVAMLPGIQPGLFESIEKPSSVTVDFWEMTKLEAIMKYKEYIPGYTSEHFDMLDEEVQSSFESALASKSDKSEIFSSLGDMEASPLEVKIAFNSKGIINQGLISVKDSYCSNLIVKQIENRYKILNNSLNPAISEDNDFNTTTNTFIDSIMAEANADNGRFMMELGKYLRVGFFPDVKTTVNLSGPEAYAAAYQDLLMFKEGSMNIHLIEADLRNFEISKTNISQSTEQQMASLATFDDARAKVQFEEYKRNYFEGSLGEDDNLDFSQNIVVDKEYLLEKISSLARSSERGYIHYIVQLQGDKISYEAACNLFAKTPYDSILFQKNIENSEVAYYYNPGDGEIQEIDKYRIPSIISDRPKIKLTFIGHGKDEFNTDIFAGLDVDSLSTEIETAIDLAKEDISSKSIEINLLGANMFSYSINVEETYPGKLLLKVKDKISELMPSISQDSIIVSANQYEVRINNEGRRELLDHSGEWINKEESIIKDISSKEYISFNPKENKITVKSKNLPELSTLLQEIRNNSNLSDIELEEKVMLAECEINVISNIDTQIVEERIEEAKNLTSDSINYIKNEFKLIESISDSLYDLKQQNELDDSHFISFEDISKTEDGFSIRFINKETGESIFVETEKEIFSEYANHIRGEISNIKDTIFDTVNGKLVKKVNLDAIHEVNTLNAAFFIQSLIGYSSSKESLSNLSVAMKVQVYAQLFSTGLNTITDAAKVVELVSTALDETIDLLPTLSEGLPVIATIIDGVSLGAAIKELSETSDPLLRQEIEAKIGIMAVNLTAATTAIITSSLGVASGFSILLVPLAGISAGIPSLVNNELVLRDKATKVVDYFKHISLVETEGAFTLLDDKIMIPQDDLVISEIDFNNNSIVLGKCEIWRMEGGSGHTVTNDIDHFFSSPTITYIKPHLSIYDVLEVQKEELDLSKDLMVLPNAPNRVFAWETGWTPGLRSLENEGTKLLDRIRDHYKGEFYWRYFAFIADALITTLKPRYEDTNIRINLDSNNRSFIVPIITTEHIREKLSYSFHGSGGTYALSLSQYNMGINIELSESDVWIIDVDNVVRDVTIDSDKIKKGDLIEGILSTLSIEDNKIILNHHEINFSGDVNGSNGFISLTFSILEGINAIIEVDLLSKSYKLLISGELKILMLNSNHIQQKIDYIGFNSELQKNIPYSFVDSEGKENGFINGSTKEGLFVSELPDVVLISKVYMDDSKPSFGYYSNNLKDVKVITKDNVNILTGYYLKDDIKISLSFTLQDEKTIKLNGVHLDESGVAEILKFMNKKGSTNTSDSLMSFLESVNIKSIFVNFLQSKINFILDANFIISGTTSIGQFEFICDENDNIQPYFIKFNTLETTYTLYVGNRQNMIVEPNYDLDDSGDISSTVINFSQKYLYGIDSCVNKVVISPNIYTDEINITPVYETNNNYPEVIVLDANYINEKINVNINDLSIRYVWSNDGNDFILMSTSEENKVSQVKIRFVNVFKDKTLANKLSFNFSDKQDVPVSEIISAFTPSYYEDGLIGYDLGLVSLYNEKFYINNFGMMVSGLIYINDSLYYFKPPVNNLITGFVTVGDDKYYFNPTNGGAASIGETIINDKNYYFNQSGILQTGVFSTEDGLKYFAPANTLDENLEGEAIDFTGKLIIDENIYYFEDNYRGAVEWKELDGEMYYFSPETGKAFKGLNQIGDDKYYFNSDGIMQKGFVSINDKKYYFDDSGVMKVGYIEIDGKYFYFAENGEMQIGVFNTSDGFKYFAHHNEDLGNEEGEAISYSGILNFNNKIYYFDYSFTAVVGWKDLEDGSKYYFDEDTAEAYVGLSLINDGQYYFNDDGIMQVGFVTINNKVFYFSDSGIIESGVQNIDDNYFYIDEKGIVQIGVFDTSDEYKYFAPANTVNDNIYGQAVDYSGLVRVGEDIYYFGETYTIETGWIYDMENESDKYYFNPETKKACKGINLIDDIKYYFDENGIMRTGLISFENNDYYFNENGEMQFGYINIEDKMFYFGEDGVMQIGVFNTQDGFKYFAHQNTLDENFEGESINYTGWLDLDEKRYYFTDEYIAATGSVIIDGEEYYFDPDTAQLVISE

SEQ ID NO: 364 - protein, 2365 aa, Artificial Sequence; identical to SEQ ID NO: 363
  Synthetic amino acid sequence

SEQ ID NO: 365 - protein, 2365 aa, Artificial Sequence
  Synthetic amino acid sequence
SLVNRKQLEKMANVRFRTQEDEYVAILDALEEYHNMSENTVVEKYLKLKDINSLTDIYIDTYKKSGRNKALKKFKEYLVTEVLELKNNNLTPVEKNLHFVAIGGQINDTAINYINQWKDVNSDYNVNVFYDSNAFLINTLKKTIVESAINDTLESFRENLNNPRFDYNKFFRKRMEIIYDKQKNFINYYKAQREENPELIIDDIVKIYLSNEYSKEIDELNTYIEESLNKIKQNSGNDVRNFEEFKNGESFKLYEQELVERWNLAAASDILRISALKEIGGMYLDVAMLPGIQPDLFESIEKPSSVTVDFWEMTKLEAIMKYKEYIPGYTSEHFDMLDEEVQSSFESALASKSDKSEIFSSLGDMEASPLEVKIAFNSKGIINQGLISVKDSYCSNLIVKQIENRYKILNNSLNPAISEDNDFNTTTNTFIDSIMAEANADNGRFMMELGKYLRVGFFPDVKTTVNLSGPEAYAAAYQDLLMFKEGSMNIHLIEADLRNFEISKTNISQSTEQQMASLATFDDARAKVQFEEYKRNYFEGSLGEDDNLDFSQNIVVDKEYLLEKISSLARSSERGYIHYIVQLQGDKISYEAACNLFAKTPYDSILFQKNIENSEVAYYYNPGDGEIQEIDKYRIPSIISDRPKIKLTFIGHGKDEFNTDIFAGLDVDSLSTEIETAIDLAKEDISSKSIEINLLGANMFSYSINVEETYPGKLLLKVKDKISELMPSISQDSIIVSANQYEVRINNEGRRELLDHSGEWINKEESIIKDISSKEYISFNPKENKITVKSKNLPELSTLLQEIRNNSNLSDIELEEKVMLAECEINVISNIDTQIVEERIEEAKNLTSDSINYIKNEFKLIESISDSLYDLKQQNELDDSHFISFEDISKTEDGFSIRFINKETGESIFVETEKEIFSEYANHIRREISNIKDTIFDTVNGKLVKKVNLDAIHEVNTLNAAFFIQSLIGYSSSKESLSNLSVAMKVQVYAQLFSTGLNTITDAAKVVELVSTALDETIDLLPTLSEGLPVIATIIDGVSLGAAIKELSETSDPLLRQEIEAKIGIMAVNLTAATTAIITSSLGIASGFSILLVPLAGISAGIPSLVNNELVLRDKATKVVDYFKHISLVETEGAFTLLDDKIMIPQDDLVISEIDFNNNSIVLGKCEIWRMEGGSGHTVTNDIDHFFSSPTITYIKPHLSIYDVLEVQKEELDLSKDLMVLPNAPNRVFAWETGWTPGLRSLENEGTKLLDRIRDHYKGEFYWRYFAFIADALITTLKPRYEDTNIRINLDSNNRSFIVPIITTEHIREKLSYSFHGSGGTYALSLSQYNMGINIELSESDVWIIDVDNVVRDVTIDSDKIKKGDLIEGILSTLSIEDNKIILNHHEINFSGDVNGSNGFISLTFSILEGINAIIEVDLLSKSYKLLISGELKILMLNSNHIQQKIDYIGFNSELQKNIPYSFVDSEGKENGFINGSTKEGLFVSELPDVVLISKVYMDDSKPSFGYYSNNLKDVKVITKDNVNILTGYYLKDDIKISLSFTLQDEKTIKLNGVHLDESGVAEILKFMNKKGSTNTSDSLMSFLESVNIKSIFVNFLQSKINFILDANFIISGTTSIGQFEFICDENDNIQPYFIKFNTLETTYTLYVGNRQNMIVEPNYDLDDSGDISSTVINFSQKYLYGIDSCVNKVVISPNIYTDEINITPVYETNNNYPEVIVLDANYINEKINVNINDLSIRYVWSNDGNDFILMSTSEENKVSQVKIRFVNVFKDKTLANKLSFNFSDKQDVPVSEIISAFTPSYYEDGLIGYDLGLVSLYNEKFYINNFGMMVSGLIYINDSLYYFKPPVNNLITGFVTVGDDKYYFNPTNGGAASIGETIINDKNYYFNQSGILQTGVFSTEDGLKYFAPANTLDENLEGEAIDFTGKLIIDENIYYFEDNYRGAVEWKELDGEMYYFSPETGKAFKGLNQIGDDKYYFNSDGIMQKGFVSINDKKYYFDDSGVMKVGYIEIDGKYFYFAENGEMQIGVFNTSDGFKYFAHHNEDLGNEEGEAISYSGILNFNNKIYYFDYSFTAVVGWKDLEDGSKYYFDEDTAEAYVGLSLINDGQYYFNDDGIMQVGFVTINNKVFYFSDSGIIESGVQNIDDNYFYIDEKGIVQIGVFDTSDEYKYFAPANTVNDNIYGQAVDYSGLVRVGEDIYYFGETYTIETGWIYDMENESDKYYFNPETKKACKGINLIDDIKYYFDENGIMRTGLISFENNDYYFNENGEMQFGYINIEDKMFYFGEDGVMQIGVFNTQDGFKYFAHQNTLDENFEGESINYTGWLDLDEKRYYFTDEYIAATGSVIIDGEEYYFDPDTAQLVISE

SEQ ID NO: 366 - protein, 2365 aa, Artificial Sequence; identical to SEQ ID NO: 363
  Synthetic amino acid sequence

SEQ ID NO: 367 - protein, 2365 aa, Artificial Sequence; identical to SEQ ID NO: 365
  Synthetic amino acid sequence

SEQ ID NO: 368 - protein, 2365 aa, Artificial Sequence; identical to SEQ ID NO: 365
  Synthetic amino acid sequence

SEQ ID NO: 369 - protein, 2365 aa, Artificial Sequence; identical to SEQ ID NO: 330
  Synthetic amino acid sequence

SEQ ID NO: 370 - protein, 2365 aa, Artificial Sequence; identical to SEQ ID NO: 363
  Synthetic amino acid sequence

SEQ ID NO: 371 - protein, 2365 aa, Artificial Sequence; identical to SEQ ID NO: 365
  Synthetic amino acid sequence

SEQ ID NO: 372 - protein, 2365 aa, Artificial Sequence
  Synthetic amino acid sequence
SLVNRKQLEKMANVRFRTQEDEYVAILDALEEYHNMSENTVVEKYLKLKDINSLTDIYIDTYKKSGRNKALKKFKEYLVIEVLELKNNNLTPVEKNLHFVAIGGQINDTAINYINQWKDVNSDYNVNVFYDSNAFLINTLKKTIVESAINDTLESFRENLNNPRFDYNKFFRKRMEIIYDKQKNFINYYKAQREENPELIIDDIVKIYLSNEYSKEIDELNTYIEESLNKIKQNSGNDVRNFEEFKNGESFKLYEQELVERWNLAAASDILRISALKEIGGMYLDVAMLPGIQPGLFESIEKPSSVTVDFWEMTKLEAIMKYKEYIPGYTSEHFDMLDEEVQSSFESALASKSDKSEIFSSLGDMEASPLEVKIAFNSKGIINQGLISVKDSYCSNLIVKQIENRYKILNNSLNPAISEDNDFNTTTNTFIDSIMAEANADNGRFMMELGKYLRVGFFPDVKTTVNLSGPEAYAAAYQDLLMFKEGSMNIHLIEADLRNFEISKTNISQSTEQQMASLATFDDARAKVQFEEYKRNYFEGSLGEDDNLDFSQNIVVDKEYLLEKISSLARSSERGYIHYIVQLQGDKISYEAACNLFAKTPYDSILFQKNIENSEVAYYYNPGDGEIQEIDKYRIPSIISDRPKIKLTFIGHGKDEFNTDIFAGLDVDSLSTEIETAIDLAKEDISSKSIEINLLGANMFSYSINVEETYPGKLLLKVKDKISELMPSISQDSIIVSANQYEVRINNEGRRELLDHSGEWINKEESIIKDISSKEYISFNPKENKITVKSKNLPELSTLLQEIRNNSNLSDIELEEKVMLAECEINVISNIDTQIVEERIEEAKNLTSDSINYIKNEFKLIESISDSLYDLKQQNELDDSHFISFEDISKTEDGFSIRFINKETGESIFVETEKEIFSEYANHIRGEISNIKDTIFDTVNGKLVKKVNLDAIHEVNTLNAAFFIQSLIGYSSSKESLSNLSVAMKVQVYAQLFSTGLNTITDAAKVVELVSTALDETIDLLPTLSEGLPVIATIIDGVSLGAAIKELSETSDPLLRQEIEAKIGIMAVNLTAATTAIITSSLGVASGFSILLVPLAGISAGIPSLVNNELVLRDKATKVVDYFKHISLVETEGAFTLLDDKIMIPQDDLVISEIDFNNNSIVLGKCEIWRMEGGSGHTVTNDIDHFFSSPTITYIKPHLSIYDVLEVQKEELDLSKDLMVLPNAPNRVFAWETGWTPGLRSLENEGTKLLDRIRDHYKGEFYWRYFAFIADALITTLKPRYEDTNIRINLDSNNRSFIVPIITTEHIREKLSYSFHGSGGTYALSLSQYNMGINIELSESDVWIIDVDNVVRDVTIDSDKIKKGDLIEGILSTLSIEDNKIILNHHEINFSGDVNGSNGFISLTFSILEGINAIIEVDLLSKSYKLLISGELKILMLNSNHIQQKIDYIGFNSELQKNIPYSFVDSEGKENGFINGSTKEGLFVSELPDVVLISKVYMDDSKPSFGYYSNNLKDVKVITKDNVNILTGYYLKDDIKISLSFTLQDEKTIKLNGVHLDESGVAEILKFMNKKGSTNTSDSLMSFLESVNIKSIFVNFLQSKINFILDANFIISGTTSIGQFEFICDENDNIQPYFIKFNTLETTYTLYVGNRQNMIVEPNYDLDDSGDISSTVINFSQKYLYGIDSCVNKVVISPNIYTDEINITPVYETNNNYPEVIVLDANYINEKINVNINDLSIRYVWSNDGNDFILMSTSEENKVSQVKIRFVNVFKDKTLANKLSFNFSDKQDVPVSEIISAFTPSYYEDGLIGYDLGLVSLYNEKFYINNFGMMVSGLIYINDSLYYFKPPVNNLITGFVTVGDDKYYFNPTNGGAASIGETIINDKNYYFNQSGILQTGVFSTEDGLKYFAPANTLDENLEGEAIDFTGKLIIDENIYYFEDNYRGAVEWKELDGEMYYFSPETGKAFKGLNQIGDDKYYFNSDGIMQKGFVSINDKKYYFDDSGVMKVGYIEIDGKYFYFAENGEMQIGVFNTSDGFKYFAHHNEDLGNEEGEAISYSGILNFNNKIYYFDYSFTAVVGWKDLEDGSKYYFDEDTAEAYVGLSLINDGQYYFNDDGIMQVGFVTINNKVFYFSDSGIIESGVQNIDDNYFYIDEKGIVQIGVFDTSDEYKYFAPANTVNDNIYGQAVDYSGLVRVGEDIYYFGETYTIETGWIYDMENESDKYYFNPETKKACKGINLIDDIKYYFDENGIMRTGLISFENNDYYFNENGEMQFGYINIEDKMFYFGEDGVMQIGVFNTQDGFKYFAHQNTLDENFEGESINYTGWLDLDEKRYYFTDEYIAATGSVIIDGEEYYFDPDTAQLVISE

SEQ ID NO: 373 - protein, 2365 aa, Artificial Sequence; identical to SEQ ID NO: 221
  Synthetic amino acid sequence

SEQ ID NO: 374 - protein, 321 aa, Artificial Sequence
  Synthetic amino acid sequence
IASTGYTIINGKHFYFNTDGIMQIGVFKGPDGFEYFAPANTHNNNIEGQAILYQNKFLTLNGKKYYFGSDSKAVTGLRTIDGKKYYFNTNTAVAVTGWQTINGKKYYFNTNTYIASTGYTIISGKHFYFNTDGIMQIGVFKGPDGFEYFAPANTDANNIEGQAIRYQNRFLYLHDNIYYFGNDSKAATGWATIDGNRYYFEPNTAMGANGYKTIDNKNFYFRNGLPQIGVFKGPNGFEYFAPANTDANNIDGQAIRYQNRFLHLLGKIYYFGNNSKAVTGWQTINSKVYYFMPDTAMAAAGGLFEIDGVIYFFGVDGVKAP

SEQ ID NO: 375 - protein, 321 aa, Artificial Sequence
  Synthetic amino acid sequence
IASTGYTSINGKHFYFNTDGIMQIGVFKGPNGFEYFAPANTHNNNIEGQAILYQNKFLTLNGKKYYFGSDSKAVTGLRTIDGKKYYFNTNTAVAVTGWQTINGKKYYFNTNTSIASTGYTIISGKHFYFNTDGIMQIGVFKGPDGFEYFAPANTDANNIEGQAIRYQNRFLYLHDNIYYFGNNSKAATGWVTIDGNRYYFEPNTAMGANGYKTIDNKNFYFRNGLPQIGVFKGSNGFEYFAPANTDANNIEGQAIRYQNRFLHLLGKIYYFGNNSKAVTGWQTINGKVYYFMPDTAMAAAGGLFEIDGVIYFFGVDGVKAP

SEQ ID NO: 376 - protein, 321 aa, Artificial Sequence; identical to SEQ ID NO: 374
  Synthetic amino acid sequence

SEQ ID NO: 377 - protein, 321 aa, Artificial Sequence; identical to SEQ ID NO: 375
  Synthetic amino acid sequence

SEQ ID NO: 378 - protein, 321 aa, Artificial Sequence; identical to SEQ ID NO: 375
  Synthetic amino acid sequence

SEQ ID NO: 379 - protein, 321 aa, Artificial Sequence
  Synthetic amino acid sequence
IASTGYTSINGKHFYFNTDGIMQIGVFKGPNGFEYFAPANTDANNIEGQAILYQNKFLTLNGKKYYFGSDSKAVTGLRTIDGKKYYFNTNTAVAVTGWQTINGKKYYFNTNTSIASTGYTIISGKHFYFNTDGIMQIGVFKGPDGFEYFAPANTDANNIEGQAIRYQNRFLYLHDNIYYFGNNSKAATGWVTIDGNRYYFEPNTAMGANGYKTIDNKNFYFRNGLPQIGVFKGSNGFEYFAPANTDANNIEGQAIRYQNRFLHLLGKIYYFGNNSKAVTGWQTINGKVYYFMPDTAMAAAGGLFEIDGVIYFFGVDGVKAP

SEQ ID NO: 380 - protein, 321 aa, Artificial Sequence
  Synthetic amino acid sequence
IASTGYTIINGKHFYFNTDGIMQIGVFKGPDGFEYFAPANTDANNIEGQAILYQNKFLTLNGKKYYFASDSKAVTGLRTIDGKKYYFNTNTAEAATGWQTIDGKKYYFNTNTSIASTGYTIINDKHFYFNTDGIMQIGVFKGPDGFEYFAPANTDANNIEGQAIRYQNRFLYLHDNIYYFGNNSKAATGWVTIDGRRYYFEPNTAIGANGYKIIDNKNFYFRNGLPQIGVFKGPNGFEYFAPANTDANNIDGQAIRYQNRFLHLLGNIYYFGNNSKAVTGWQTINGNMYYFMPDTAMAAAGGLFEIDGVIYFFGVDGVKAP

SEQ ID NO: 381 - protein, 321 aa, Artificial Sequence; identical to SEQ ID NO: 379
  Synthetic amino acid sequence

SEQ ID NO: 382 - protein, 321 aa, Artificial Sequence; identical to SEQ ID NO: 380
  Synthetic amino acid sequence

SEQ ID NO: 383 - protein, 321 aa, Artificial Sequence; identical to SEQ ID NO: 374
  Synthetic amino acid sequence

SEQ ID NO: 384 - protein, 321 aa, Artificial Sequence; identical to SEQ ID NO: 375
  Synthetic amino acid sequence

SEQ ID NO: 385 - protein, 321 aa, Artificial Sequence; identical to SEQ ID NO: 375
  Synthetic amino acid sequence

SEQ ID NO: 386 - protein, 321 aa, Artificial Sequence; identical to SEQ ID NO: 380
  Synthetic amino acid sequence

SEQ ID NO: 387 - protein, 321 aa, Artificial Sequence; identical to SEQ ID NO: 375
  Synthetic amino acid sequence

SEQ ID NO: 388 - protein, 321 aa, Artificial Sequence; identical to SEQ ID NO: 380
  Synthetic amino acid sequence

SEQ ID NO: 389 - protein, 321 aa, Artificial Sequence
  Synthetic amino acid sequence
IASTGYTIINGKHFYFNTDGIMQIGVFKGPDGFEYFAPANTHNNNIEGQAILYQNKFLTLNGKKYYFGSDSKAVTGLRTIDGKKYYFNTNTAVAVTGWQTINGKKYYFNTNTYIASTGYTIISGKHFYFNTDGIMQIGVFKGPDGFEYFAPANTDANNIEGQAIRYQNRFLYLHDNIYYFGNDSKAATGWATIDGNRYYFEPNTAMGANGYKTIDNKNFYFRNGLPQIGVFKGPNGFEYFAPANTDANNIDGQAIRYQNRFLHLLGNIYYFGNNSKAVTGWQTINGKVYYFMPDTAMAAAGGLFEIDGVIYFFGVDGVKAP

SEQ ID NO: 390 - protein, 321 aa, Artificial Sequence; identical to SEQ ID NO: 389
  Synthetic amino acid sequence

SEQ ID NO: 391 - protein, 321 aa, Artificial Sequence; identical to SEQ ID NO: 389
  Synthetic amino acid sequence

SEQ ID NO: 392 - protein, 321 aa, Artificial Sequence; identical to SEQ ID NO: 375
  Synthetic amino acid sequence

SEQ ID NO: 393 - protein, 321 aa, Artificial Sequence; identical to SEQ ID NO: 379
  Synthetic amino acid sequence

SEQ ID NO: 394 - protein, 321 aa, Artificial Sequence; identical to SEQ ID NO: 379
  Synthetic amino acid sequence

SEQ ID NO: 395 - protein, 321 aa, Artificial Sequence; identical to SEQ ID NO: 375
  Synthetic amino acid sequence

SEQ ID NO: 396 - protein, 321 aa, Artificial Sequence; identical to SEQ ID NO: 374
  Synthetic amino acid sequence

SEQ ID NO: 397 - protein, 321 aa, Artificial Sequence; identical to SEQ ID NO: 375
  Synthetic amino acid sequence

SEQ ID NO: 398 - protein, 321 aa, Artificial Sequence; identical to SEQ ID NO: 375
  Synthetic amino acid sequence

SEQ ID NO: 399 - protein, 321 aa, Artificial Sequence; identical to SEQ ID NO: 375
  Synthetic amino acid sequence

SEQ ID NO: 400 - protein, 321 aa, Artificial Sequence; identical to SEQ ID NO: 375
  Synthetic amino acid sequence

SEQ ID NO: 401 - protein, 321 aa, Artificial Sequence; identical to SEQ ID NO: 375
  Synthetic amino acid sequence

SEQ ID NO: 402 - protein, 321 aa, Artificial Sequence; identical to SEQ ID NO: 379
  Synthetic amino acid sequence

SEQ ID NO: 403 - protein, 321 aa, Artificial Sequence; identical to SEQ ID NO: 375
  Synthetic amino acid sequence

SEQ ID NO: 404 - protein, 321 aa, Artificial Sequence; identical to SEQ ID NO: 375
  Synthetic amino acid sequence

SEQ ID NO: 405 - protein, 321 aa, Artificial Sequence; identical to SEQ ID NO: 375
  Synthetic amino acid sequence

SEQ ID NO: 406 - protein, 321 aa, Artificial Sequence; identical to SEQ ID NO: 375
  Synthetic amino acid sequence

SEQ ID NO: 407 - protein, 321 aa, Artificial Sequence; identical to SEQ ID NO: 379
  Synthetic amino acid sequence

SEQ ID NO: 408 - protein, 321 aa, Artificial Sequence; identical to SEQ ID NO: 375
  Synthetic amino acid sequence

SEQ ID NO: 409 - protein, 321 aa, Artificial Sequence; identical to SEQ ID NO: 375
  Synthetic amino acid sequence

SEQ ID NO: 410 - protein, 321 aa, Artificial Sequence; identical to SEQ ID NO: 375
  Synthetic amino acid sequence

SEQ ID NO: 411 - protein, 321 aa, Artificial Sequence
  Synthetic amino acid sequence
IASTGYTSINGKHFYFNTDGIMQIGVFKGPNGFEYFAPANTHNNNIEGQAILYQNKFLTLNGKKYYFASDSKAVTGLRTIDGKKYYFNTNTAVAATGWQTINGKKYYFNTNTSIASTGYTIINGKHFYFNTDGIMQIGVFKGPDGFEYFAPANTDANNIEGQAIRYQNRFLYLHDNIYYFGNNSKAATGWVTIDGRRYYFEPNTAIGANGYKIIDNKNFYFRNGLPQIGVFKGPNGFEYFAPANTDANNIDGQAIRYQNRFLHLLGNIYYFGNNSKAVTGWQTINGNMYYFMPDTAMAAAGGLFEIDGVIYFFGVDGVKAP

SEQ ID NO: 412 - protein, 321 aa, Artificial Sequence; identical to SEQ ID NO: 375
  Synthetic amino acid sequence

SEQ ID NO: 413 - protein, 321 aa, Artificial Sequence
  Synthetic amino acid sequence
IASTGYTSINGKHFYFNTDGIMQIGVFKGPNGFEYFAPANTHNNNIEGQAILYQNKFLTLNGKKYYFASDSKAVTGLRTIDGKKYYFNTNTAEAATGWQTINGKKYYFNTNTSIASTGYTIINGKHFYFNTDGIMQIGVFKGPDGFEYFAPANTDANNIEGQAIRYQNRFLYLHDNIYYFGNNSKAATGWVTIDGRRYYFEPNTAIGANGYKIIDNKNFYFRNGLPQIGVFKGPNGFEYFAPANTDANNIDGQAIRYQNRFLHLLGNIYYFGNNSKAVTGWQTINGNMYYFMPDTAMAAAGGLFEIDGVIYFFGVDGVKAP

SEQ ID NO: 414 - protein, 321 aa, Artificial Sequence; identical to SEQ ID NO: 375
  Synthetic amino acid sequence

SEQ ID NO: 415 - protein, 321 aa, Artificial Sequence
  Synthetic amino acid sequence
IASTGYTSINGKHFYFNTDGIMQIGVFKGPNGFEYFAPANTHNNNIEGQAILYQNKFLTLNGKKYYFASDSKAVTGLRTIDGKKYYFNTNTAVAVTGWQTINGKKYYFNTNTSIASTGYTIISGKHFYFNTDGIMQIGVFKGPDGFEYFAPANTDANNIEGQAIRYQNRFLYLHDNIYYFGNNSKAATGWVTIDGRRYYFEPNTAIGANGYKIIDNKNFYFRNGLPQIGVFKGPNGFEYFAPANTDANNIEGQAIRYQNRFLHLLGNIYYFGNNSKAVTGWQTINGNMYYFMPDTAMAAAGGLFEIDGVIYFFGVDGVKAP

SEQ ID NO: 416 - protein, 321 aa, Artificial Sequence
  Synthetic amino acid sequence
IASTGYTSINGKHFYFNTDGIMQIGVFKGPNGFEYFAPANTHNNNIEGQAILYQNKFLTLNGKKYYFASDSKAVTGLRTIDGKKYYFNTNTAVAVTGWQTINGKKYYFNTNTSIASTGYTIINGKHFYFNTDGIMQIGVFKGPDGFEYFAPANTDANNIEGQAIRYQNRFLYLHDNIYYFGNNSKAATGWVTIDGRRYYFEPNTAIGANGYKIIDNKNFYFRNGLPQIGVFKGPNGFEYFAPANTDANNIDGQAIRYQNRFLHLLGNIYYFGNNSKAVTGWQTINGNMYYFMPDTAMAAAGGLFEIDGVIYFFGVDGVKAP

SEQ ID NO: 417 - protein, 321 aa, Artificial Sequence; identical to SEQ ID NO: 380
  Synthetic amino acid sequence

SEQ ID NO: 418 - protein, 321 aa, Artificial Sequence; identical to SEQ ID NO: 375
  Synthetic amino acid sequence

SEQ ID NO: 419 - protein, 321 aa, Artificial Sequence; identical to SEQ ID NO: 416
  Synthetic amino acid sequence

SEQ ID NO: 420 - protein, 321 aa, Artificial Sequence; identical to SEQ ID NO: 375
  Synthetic amino acid sequence

SEQ ID NO: 421 - protein, 321 aa, Artificial Sequence; identical to SEQ ID NO: 379
  Synthetic amino acid sequence

SEQ ID NO: 422 - protein, 612 aa, Artificial Sequence
  Synthetic amino acid sequence
FILMSTDEENKVSQVKIRFTNVFKGNTISDKISFNFSDKQDVSINKVISTFTPSYYVEGLLNYDLGLISLYNEKFYINNFGMMVSGLVYINDSLYYFKPPIKNLITGFTTIGDDKYYFNPDNGGAASVGETIIDGKNYYFSQNGVLQTGVFSTEDGFKYFAPADTLDENLEGEAIDFTGKLTIDENVYYFGDNYRAAIEWQTLDDEVYYFSTDTGRAFKGLNQIGDDKFYFNSDGIMQKGFVNINDKTFYFDDSGVMKSGYTEIDGKYFYFAENGEMQIGVFNTADGFKYFAHHDEDLGNEEGEALSYSGILNFNNKIYYFDDSFTAVVGWKDLEDGSKYYFDEDTAEAYIGISIINDGKYYFNDSGIMQIGFVTINNEVFYFSDSGIVESGMQNIDDNYFYIDENGLVQIGVFDTSDGYKYFAPANTVNDNIYGQAVEYSGLVRVGEDVYYFGETYTIETGWIYDMENESDKYYFDPETKKAYKGINVIDDIKYYFDENGIMRTGLITFEDNHYYFNEDGIMQYGYLNIEDKTFYFSEDGIMQIGVFNTPDGFKYFAHQNTLDENFEGESINYTGWLDLDEKRYYFTDEYIAATGSVIIDGEEYYFDPDTA

SEQ ID NO: 423 - protein, 612 aa, Artificial Sequence
  Synthetic amino acid sequence
FILMSTSEENKVSQVKIRFVNVFKDKTLANKLSFNFSDKQDVPVSEIILSFTPSYYEDGLIGYDLGLVSLYNEKFYINNFGMMVSGLIYINDSLYYFKPPVNNLITGFVTVGDDKYYFNPINGGAASIGETIIDDKNYYFNQSGVLQTGVFSTEDGFKYFAPANTLDENLEGEAIDFTGKLIIDENIYYFDDNYRGAVEWKELDGEMHYFSPETGKAFKGLNQIGDYKYYFNSDGVMQKGFVSINDNKHYFDDSGVMKVGYTEIDGKHFYFAENGEMQIGVFNTEDGFKYFAHHNEDLGNEEGEEISYSGILNFNNKIYYFDDSFTAVVGWKDLEDGSKYYFDEDTAEAYIGLSLINDGQYYFNDDGIMQVGFVTINDKVFYFSDSGIIESGVQNIDDNYFYIDDNGIVQIGVFDTSDGYKYFAPANTVNDNIYGQAVEYSGLVRVGEDVYYFGETYTIETGWIYDMENESDKYYFNPETKKACKGINLIDDIKYYFDEKGIMRTGLISFENNNYYFNENGEMQFGYINIEDKMFYFGEDGVMQIGVFNTPDGFKYFAHQNTLDENFEGESINYTGWLDLDEKRYYFTDEYIAATGSVIIDGEEYYFDPDTA

SEQ ID NO: 424 - protein, 612 aa, Artificial Sequence; identical to SEQ ID NO: 422
  Synthetic amino acid sequence

SEQ ID NO: 425 - protein, 612 aa, Artificial Sequence; identical to SEQ ID NO: 423
  Synthetic amino acid sequence

SEQ ID NO: 426 - protein, 612 aa, Artificial Sequence
  Synthetic amino acid sequence
FILMSTSEENKVSQVKIRFVNVFKDKTLANKLSFNFSDKQDVPVSEIILSFTPSYYEDGLIGYDLGLVSLYNEKFYINNFGMMVSGLIYINDSLYYFKPPVNNLITGFVTVGDDKYYFNPINGGAASIGETIIDDKNYYFNQSGVLQTGVFSTEDGFKYFAPANTLDENLEGEAIDFTGKLIIDENIYYFDDNYRGAVEWKELDGEMHYFSPETGKAFKGLNQIGDDKYYFNSDGVMQKGFVSINDNKHYFDDSGVMKVGYTEIDGKHFYFAENGEMQIGVFNTEDGFKYFAHHNEDLGNEEGEEISYSGILNFNNKIYYFDDSFTAVVGWKDLEDGSKYYFDEDTAEAYIGLSLINDGQYYFNDDGIMQVGFVTINDKVFYFSDSGIIESGVQNIDDNYFYIDDNGIVQIGVFDTSDGYKYFAPANTVNDNIYGQAVEYSGLVRVGEDVYYFGETYTIETGWIYDMENESDKYYFNPETKKACKGINLIDDIKYYFDEKGIMRTGLISFENNNYYFNENGEMQFGYINIEDKMFYFGEDGVMQIGVFNTPDGFKYFAHQNTLDENFEGESINYTGWLDLDEKRYYFTDEYIAATGSVIIDGEEYYFDPDTA

SEQ ID NO: 427 - protein, 612 aa, Artificial Sequence; identical to SEQ ID NO: 426
  Synthetic amino acid sequence

SEQ ID NO: 428 - protein, 612 aa, Artificial Sequence
  Synthetic amino acid sequence
FILMSTSEENKVSQVKIRFVNVFKDKTLANKLSFNFSDKQDVPVSEIISAFTPSYYEDGLIGYDLGLVSLYNEKFYINNFGMMVSGLIYINDSLYYFKPPVNNLITGFVTVGDDKYYFNPTNGGAASIGETIINDKNYYFNQSGILQTGVFSTEDGLKYFAPANTLDENLEGEAIDFTGKLIIDENIYYFEDNYRGAVEWKELDGEMYYFSPETGKAFKGLNQIGDDKYYFNSDGIMQKGFVSINDKKYYFDDSGVMKVGYIEIDGKYFYFAENGEMQIGVFNTSDGFKYFAHHNEDLGNEEGEAISYSGILNFNNKIYYFDYSFTAVVGWKDLEDGSKYYFDEDTAEAYVGLSLINDGQYYFNDDGIMQVGFVTINNKVFYFSDSGIIESGVQNIDDNYFYIDEKGIVQIGVFDTSDEYKYFAPANTVNDNIYGQAVDYSGLVRVGEDIYYFGETYTIETGWIYDMENESDKYYFNPETKKACKGINLIDDIKYYFDENGIMRTGLISFENNDYYFNENGEMQFGYINIEDKMFYFGEDGVMQIGVFNTQDGFKYFAHQNTLDENFEGESINYTGWLDLDEKRYYFTDEYIAATGSVIIDGEEYYFDPDTA

SEQ ID NO: 429 - protein, 612 aa, Artificial Sequence; identical to SEQ ID NO: 426
  Synthetic amino acid sequence

SEQ ID NO: 430 - protein, 612 aa, Artificial Sequence; identical to SEQ ID NO: 428
  Synthetic amino acid sequence

SEQ ID NO: 431 - protein, 612 aa, Artificial Sequence; identical to SEQ ID NO: 422
  Synthetic amino acid sequence

SEQ ID NO: 432 - protein, 612 aa, Artificial Sequence; identical to SEQ ID NO: 423
  Synthetic amino acid sequence

SEQ ID NO: 433 - protein, 612 aa, Artificial Sequence
  Synthetic amino acid sequence
FILMSTSEENKVSQVKIRFVNVFKDKTLANKLSFNFSDKQDVPVSEIILSFTPSYYEDGLIGYDLGLVSLYNEKFYINNFGMMVSGLIYINDSLYYFKPPVNNLITGFVTVGDDKYYFNPINGGAASIGETIIDDKNYYFNQSGVLQTGVFSTEDGFKYFAPANTLDENLEGEAIDFTGKLIIDENIYYFEDNYRGAVEWKELDGEMHYFSPETGKAFKGLNQIGDDKYYFNSDGVMQKGFVSINDNKHYFDDSGVMKVGYTEIDGKHFYFAENGEMQIGVFNTEDGFKYFAHHNEDLGNEEGEEISYSGILNFNNKIYYFDDSFTAVVGWKDLEDGSKYYFDEDTAEAYIGLSLINDGQYYFNDDGIMQVGFVTINDKVFYFSDSGIIESGVQNIDDNYFYIDDNGIVQIGVFDTSDGYKYFAPANTVNDNIYGQAVEYSGLVRVGEDVYYFGETYTIETGWIYDMENESDKYYFDPETKKACKGINLIDDIKYYFDEKGIMRTGLISFENNNYYFNENGEMQFGYINIEDKMFYFGEDGVMQIGVFNTPDGFKYFAHQNTLDENFEGESINYTGWLDLDEKRYYFTDEYIAATGSVIIDGEEYYFDPDTA

SEQ ID NO: 434 - protein, 612 aa, Artificial Sequence; identical to SEQ ID NO: 423
  Synthetic amino acid sequence

SEQ ID NO: 435 - protein, 612 aa, Artificial Sequence; identical to SEQ ID NO: 428
  Synthetic amino acid sequence

SEQ ID NO: 436 - protein, 612 aa, Artificial Sequence; identical to SEQ ID NO: 426
  Synthetic amino acid sequence

SEQ ID NO: 437 - protein, 612 aa, Artificial Sequence; identical to SEQ ID NO: 428
  Synthetic amino acid sequence

SEQ ID NO: 438 - protein, 612 aa, Artificial Sequence
  Synthetic amino acid sequence
FILMSTDEENKVSQVKIRFTNVFKGNTISDKISFNFSDKQDVSINKIISTFTPSYYVEGLLNYHLGLISLYNEKFYINNFGMMVSGLVYINDSLYYFKPPIKNLITGFTTIGDDKYYFNPDNGGAASVGETIIDGKNYYFSPNGVLQTGVFSTEDGFKYFAPADTLDENLEGEAIDFTGKLIIDENVYYFGDNYRAAIEWQTLDDEVYYFSTDTGRAFKGLNQIGDDKFYFNSDGIMQKGFVNINDKTFYFDDSGVMKSGYTEIDGKHFYFAENGEMQIGVFNTADGFKYFAHHDEDLGNEEGEALSYSGILNFNNKIYYFDDSFTAVVGWKDSEDGSKYYFDEDTAEAYIGISTINDGKYYFNDSGIMQIGFVTINNEVFYFSDSGIVESGMQNIDDNYFYIDENGLVQIGVFDTSDGYKYFAPANTVNDNIYGQAVEYSGLVRVGEDVYYFGETYTIETGWIYDMENESDKYYFDPETKKAYKGINVIDDIKYYFDENGIMRTGLITFEDNHYYFNEDGIMQYGYINIEDKMFYFNEDGVMQIGVFNTADGFKYFAHQNTLDENFEGESINYTGWLDLDEKRYYFTDEYIAAIGSVIIDGEEYYFDPDTA

SEQ ID NO: 439 - protein, 612 aa, Artificial Sequence; identical to SEQ ID NO: 438
  Synthetic amino acid sequence

SEQ ID NO: 440 - protein, 612 aa, Artificial Sequence; identical to SEQ ID NO: 438
  Synthetic amino acid sequence

SEQ ID NO: 441 - protein, 612 aa, Artificial Sequence; identical to SEQ ID NO: 423
  Synthetic amino acid sequence

SEQ ID NO: 442 - protein, 612 aa, Artificial Sequence; identical to SEQ ID NO: 426
  Synthetic amino acid sequence

SEQ ID NO: 443 - protein, 612 aa, Artificial Sequence
  Synthetic amino acid sequence
FILMSTSEENKVSQVKIRFVNVFKDKTLANKLSFNFSDKQDVPVSEIILSFTPSYYEDGLIGYDLGLVSLYNEKFYINNFGMMLSGLIYINDSLYYFKPPVNNLITGFVTVGDDKYYFNPINGGAASIGETIIDDKNYYFNQSGVLQTGVFSTEDGFKYFAPANTLDENLEGEAIDFTGKLIIDENIYYFDDNYRGAVEWKELDGEMHYFSPETGKAFKGLNQIGDDKYYFNSDGVMQKGFVSINDNKHYFDDSGVMKVGYTEIDGKHFYFAENGEMQIGVFNTEDGFKYFAHHNEDLGNEEGEEISYSGILNFNNKIYYFDDSFTAVVGWKDLEDGSKYYFDEDTAEAYIGLSLINDGQYYFNDDGIMQVGFVTINDKVFYFSDSGIIESGVQNIDDNYFYIDDNGIVQIGVFDTSDGYKYFAPANTVNDNIYGQAVEYSGLVRVGEDVYYFGETYTIETGWIYDMENESDKYYFNPETKKACKGINLIDDIKYYFDEKGIMRTGLISFENNNYYFNENGEMQFGYINIEDKMFYFGEDGVMQIGVFNTPDGFKYFAHQNTLDENFEGESINYTGWLDLDEKRYYFTDEYIAATGSVIIDGEEYYFDPDTA

SEQ ID NO: 444 - protein, 612 aa, Artificial Sequence; identical to SEQ ID NO: 423
  Synthetic amino acid sequence

SEQ ID NO: 445 - protein, 612 aa, Artificial Sequence; identical to SEQ ID NO: 422
  Synthetic amino acid sequence

SEQ ID NO: 446 - protein, 612 aa, Artificial Sequence; identical to SEQ ID NO: 423
  Synthetic amino acid sequence

SEQ ID NO: 447 - protein, 612 aa, Artificial Sequence; identical to SEQ ID NO: 423
  Synthetic amino acid sequence

SEQ ID NO: 448 - protein, 612 aa, Artificial Sequence; identical to SEQ ID NO: 423
  Synthetic amino acid sequence

SEQ ID NO: 449 - protein, 612 aa, Artificial Sequence; identical to SEQ ID NO: 423
  Synthetic amino acid sequence

SEQ ID NO: 450 - protein, 612 aa, Artificial Sequence; identical to SEQ ID NO: 423
  Synthetic amino acid sequence

SEQ ID NO: 451 - protein, 612 aa, Artificial Sequence; identical to SEQ ID NO: 426
  Synthetic amino acid sequence

SEQ ID NO: 452 - protein, 612 aa, Artificial Sequence; identical to SEQ ID NO: 433
  Synthetic amino acid sequence

SEQ ID NO: 453 - protein, 612 aa, Artificial Sequence; identical to SEQ ID NO: 426
  Synthetic amino acid sequence

SEQ ID NO: 454 - protein, 612 aa, Artificial Sequence; identical to SEQ ID NO: 426
  Synthetic amino acid sequence

SEQ ID NO: 455 - protein, 612 aa, Artificial Sequence; identical to SEQ ID NO: 426
  Synthetic amino acid sequence

SEQ ID NO: 456 - protein, 612 aa, Artificial Sequence; identical to SEQ ID NO: 426
  Synthetic amino acid sequence

SEQ ID NO: 457 - protein, 612 aa, Artificial Sequence; identical to SEQ ID NO: 426
  Synthetic amino acid sequence

SEQ ID NO: 458 - protein, 612 aa, Artificial Sequence; identical to SEQ ID NO: 426
  Synthetic amino acid sequence

SEQ ID NO: 459 - protein, 612 aa, Artificial Sequence
  Synthetic amino acid sequence
FILMSTSEENKVSQVKIRFVNVFKDKTLANKLSFNFSDKQDVPVSEIILSFTPSYYEDGLIGYDLGLVSLYNEKFYINNFGMMVSGLIYINDSLYYFKPPVNNLITGFVTVGDDKYYFNPINGGAASIGETIIDDKNYYFNQSGVLQTGVFSTEDGFKYFAPANTLDENLEGEAIDFTGKLIIDENIYYFEDNYRGAVEWKELDGEMHYFSPETGKAFKGLNQIGDDKYYFNSDGVMQKGFVSINDNKHYFDDSGVMKVGYTEIDGKYFYFAENGEMQIGVFNTEDGFKYFAHHNEDLGNEEGEEISYSGILNFNNKIYYFDDSFTAVVGWKDLEDGSKYYFDEDTAEAYIGLSLINDGQYYFNDDGIMQVGFVTINDKVFYFSDSGIIESGVQNIDDNYFYIDDNGIVQIGVFDTSDGYKYFAPANTVNDNIYGQAVEYSGLVRVGEDVYYFGETYTIETGWIYDMENESDKYYFNPETKKACKGINLIDDIKYYFDEKGIMRTGLISFENNNYYFNENGEMQFGYINIEDKMFYFGEDGVMQIGVFNTPDGFKYFAHQNTLDENFEGESINYTGWLDLDEKRYYFTDEYIAATGSVIIDGEEYYFDPDTA

SEQ ID NO: 460 - protein, 612 aa, Artificial Sequence; identical to SEQ ID NO: 423
  Synthetic amino acid sequence

SEQ ID NO: 461 - protein, 612 aa, Artificial Sequence; identical to SEQ ID NO: 428
  Synthetic amino acid sequence

SEQ ID NO: 462 - protein, 612 aa, Artificial Sequence; identical to SEQ ID NO: 428
  Synthetic amino acid sequence

SEQ ID NO: 463 - protein, 612 aa, Artificial Sequence; identical to SEQ ID NO: 428
  Synthetic amino acid sequence

SEQ ID NO: 464 - protein, 612 aa, Artificial Sequence; identical to SEQ ID NO: 428
  Synthetic amino acid sequence

SEQ ID NO: 465 - protein, 612 aa, Artificial Sequence; identical to SEQ ID NO: 428
  Synthetic amino acid sequence

SEQ ID NO: 466 - protein, 612 aa, Artificial Sequence; identical to SEQ ID NO: 428
  Synthetic amino acid sequence

SEQ ID NO: 467 - protein, 612 aa, Artificial Sequence; identical to SEQ ID NO: 428
  Synthetic amino acid sequence

SEQ ID NO: 468 - protein, 612 aa, Artificial Sequence; identical to SEQ ID NO: 428
  Synthetic amino acid sequence

SEQ ID NO: 469 - protein, 612 aa, Artificial Sequence; identical to SEQ ID NO: 428
  Synthetic amino acid sequence

SEQ ID NO: 470 - protein, 612 aa, Artificial Sequence; identical to SEQ ID NO: 428
  Synthetic amino acid sequence

SEQ ID NO: 471 - protein, 612 aa, Artificial Sequence; identical to SEQ ID NO: 423
  Synthetic amino acid sequence

SEQ ID NO: 472 - protein, 540 aa, Artificial Sequence
  Synthetic amino acid sequence
SLISKEELIKLAYSIRPRENEYKTILTNLDEYNKLTTNNNENKYLQLKKLNESIDVFMNKYKNSSRNRALSNLKKDILKEVILIKNSNTSPVEKNLHFVWIGGEVSDIALEYIKQWADINAEYNIKLWYDSEAFLVNTLKKAIVESSTTEALQLLEEEIQNPQFDNMKFYKKRMEFIYDRQKRFINYYKSQINKPTVPTIDDIIKSHLVSEYNRDETLLESYRTNSLRKINSNHGIDIRANSLFTEQELLNIYSQELLNRGNLAAASDIVRLLALKNFGGVYLDVDMLPGIHSDLFKTIPRPSSIGLDRWEMIKLEAIMKYKKYINNYTSENFDKLDQQLKDNFKLIIESKSEKSEIFSKLENLNVSDLEIKIAFALGSVINQALISKQGSYLTNLVIEQVKNRYQFLNQHLNPAIESDNNFTDTTKIFHDSLFNSATAENSMFLTKIAPYLQVGFMPEARSTISLSGPGAYASAYYDFINLQENTIEKTLKASDLIEFKFPENNLSQLTEQEINSLWSFDQASAKYQFEKYVRDYTGGS

SEQ ID NO: 473 - protein, 540 aa, Artificial Sequence
  Synthetic amino acid sequence
SLISKEELIKLAYSIRPRENEYKTILTNLDEYNKLTTNNNENKYLQLKKLNESIDVFMNKYKTSSRNRALSNLKKDILKEVILIKNSNTSPVEKNLHFVWIGGEVSDIALEYIKQWADINAEYNIKLWYDSEAFLVNTLKKAIVESSTTEALQLLEEEIQNPQFDNMKFYKKRMEFIYDRQKRFINYYKSQINKPTVPTIDDIIKSHLVSEYNRDETVLESYRTNSLRKINSNHGIDIRANSLFTEQELLNIYSQELLNRGNLAAASDIVRLLALKNFGGVYLDVDMLPGIHSDLFKTISRPSSIGLDRWEMIKLEAIMKYKKYINNYTSENFDKLDQQLKDNFKLIIESKSEKSEIFSKLENLNVSDLEIKIAFALGSVINQALISKQGSYLTNLVIEQVKNRYQFLNQHLNPAIESDNNFTDTTKIFHDSLFNSATAENSMFLTKIAPYLQVGFMPEARSTISLSGPGAYASAYYDFINLQENTIEKTLKASDLIEFKFPENNLSQLTEQEINSLWSFDQASAKYQFEKYVRDYTGGS

SEQ ID NO: 474 - protein, 540 aa, Artificial Sequence; identical to SEQ ID NO: 472
  Synthetic amino acid sequence

SEQ ID NO: 475 - protein, 540 aa, Artificial Sequence; identical to SEQ ID NO: 473
  Synthetic amino acid sequence

SEQ ID NO: 476 - protein, 540 aa, Artificial Sequence; identical to SEQ ID NO: 473
  Synthetic amino acid sequence

SEQ ID NO: 477 - protein, 540 aa, Artificial Sequence; identical to SEQ ID NO: 473
  Synthetic amino acid sequence

SEQ ID NO: 478 - protein, 540 aa, Artificial Sequence
  Synthetic amino acid sequence
SLISKEELIKLAYSIRPRENEYKTILTNLDEYNKLTTNNNENKYLQLKKLNESIDVFMNKYKNSSRNRALSNLKKDILKEVILIKNSNTSPVEKNLHFVWIGGEVSDIALEYIKQWADINAEYNIKLWYDSEAFLVNTLKKAIVESSTTEALQLLEEEIQNPQFDNMKFYKKRMEFIYDRQKRFVNYYKSQINKPTVPTIDDIIKSHLVSEYNRDETLLESYRTNSLRKINSNHGIDIRANSLFTEQELLNIYSQELLNRGNLAAASDIVRLLALKNFGGVYLDVDMLPGIHSDLFKTISRPSSIGLDRWEMIKLEAIMKYKKYINNYTSENFDKLDQQLKDNFKLIIESKSEKSEIFSKLENLNVSDLEIKIAFALGSVINQALISKQGSYLTNLVIEQVKNRYQFLNQHLNPAIESDNNFTDTTKIFHDSLFNSATAENSMFLTKIAPYLQVGFMPEARSTISLSGPGAYASAYYDFINLQENTIEKTLKASDLIEFKFPENNLSQLTEQEINSLWSFDQASAKYQFEKYVRDYTGGS

SEQ ID NO: 479 - protein, 540 aa, Artificial Sequence; identical to SEQ ID NO: 473
  Synthetic amino acid sequence

SEQ ID NO: 480 - protein, 540 aa, Artificial Sequence; identical to SEQ ID NO: 478
  Synthetic amino acid sequence

SEQ ID NO: 481 - protein, 540 aa, Artificial Sequence; identical to SEQ ID NO: 472
  Synthetic amino acid sequence

SEQ ID NO: 482 - protein, 540 aa, Artificial Sequence; identical to SEQ ID NO: 473
  Synthetic amino acid sequence

SEQ ID NO: 483 - protein, 540 aa, Artificial Sequence; identical to SEQ ID NO: 473
  Synthetic amino acid sequence

SEQ ID NO: 484 - protein, 540 aa, Artificial Sequence; identical to SEQ ID NO: 478
  Synthetic amino acid sequence

SEQ ID NO: 485 - protein, 540 aa, Artificial Sequence; identical to SEQ ID NO: 473
  Synthetic amino acid sequence

SEQ ID NO: 486 - protein, 540 aa, Artificial Sequence; identical to SEQ ID NO: 478
  Synthetic amino acid sequence

SEQ ID NO: 487 - protein, 540 aa, Artificial Sequence
  Synthetic amino acid sequence
SLISKEELIKLAYSIRPRENEYKTILTNLDEYNKLTTNNNENKYLQLKKLNESIDVFMNKYKNSSRNRALSNLKKDILKEVILIKNSNTSPVEKNLHFVWIGGEVSDIALEYIKQWADINAEYNIKLWYDSEAFLVNTLKKAIVESSTTEALQLLEEEIQNPQFDNTKFYKKRMEFIYDRQKRFINYYKSQINKPTVPTIDDIIKSHLVSEYNRDETLLESYRTNSLRKINSNHGIDIRANSLFTEQELLNIYSQELLNRGNLAAASDIVRLLALKNFGGVYLDVDMLPGIHSDLFKTISRPSSIGLDRWEMIKLEAIMKYKKYINNYTSENFDKLDQQLKDNFKLIIESKSEKSEIFSKLENLNVSDLEIKIAFALGSVINQALISKQGSYLTNLVIEQVKNRYQFLNQHLNPAIESDNNFTDTTKIFHDSLFNSATAENSMFLTKIAPYLQVGFMPEARSTISLSGPGAYASAYYDFINLQENTIEKTLKASDLIEFKFPENNLSQLTEQEINSLWSFDQASAKYQFEKYVRDYTGGS

SEQ ID NO: 488 - protein, 540 aa, Artificial Sequence; identical to SEQ ID NO: 487
  Synthetic amino acid sequence

SEQ ID NO: 489 - protein, 540 aa, Artificial Sequence; identical to SEQ ID NO: 487
  Synthetic amino acid sequence

SEQ ID NO: 490 - protein, 540 aa, Artificial Sequence; identical to SEQ ID NO: 473
  Synthetic amino acid sequence

SEQ ID NO: 491 - protein, 540 aa, Artificial Sequence; identical to SEQ ID NO: 473
  Synthetic amino acid sequence

SEQ ID NO: 492 - protein, 540 aa, Artificial Sequence; identical to SEQ ID NO: 473
  Synthetic amino acid sequence

SEQ ID NO: 493 - protein, 540 aa, Artificial Sequence; identical to SEQ ID NO: 473
  Synthetic amino acid sequence

SEQ ID NO: 494 - protein, 540 aa, Artificial Sequence; identical to SEQ ID NO: 472
  Synthetic amino acid sequence

SEQ ID NO: 495 - protein, 540 aa, Artificial Sequence; identical to SEQ ID NO: 473
  Synthetic amino acid sequence

SEQ ID NO: 496 - protein, 540 aa, Artificial Sequence; identical to SEQ ID NO: 473
  Synthetic amino acid sequence

SEQ ID NO: 497 - protein, 540 aa, Artificial Sequence; identical to SEQ ID NO: 473
  Synthetic amino acid sequence

SEQ ID NO: 498 - protein, 540 aa, Artificial Sequence
  Synthetic amino acid sequence
SLISKEELIKLAYSIRPRENEYKTILTNLDEYNKLTTNNNENKYLQLKKLNESIDVFMNKYKTSSRNRALSNLKKDILKEVILIKNSNTSPVEKNLHFVWIGGEVSDIALEYIKQWADINAEYNIKLWYDSEAFLVNTLKKAIVESSTTEALQLLEEEIQNPQFDNMKFYKKRMEFIYDRQKRFINYYKSQINKPTVPTIDDIIKSHLVSEYNRDETVLESYRTNSLRKINSNHGIDIRANSLFTEQELLNIYSQGLLNRGNLAAASDIVRLLALKNFGGVYLDVDMLPGIHSDLFKTISRPSSIGLDRWEMIKLEAIMKYKKYINNYTSENFDKLDQQLKDNFKLIIESKSEKSEIFSKLENLNVSDLEIKIAFALGSVINQALISKQGSYLTNLVIEQVKNRYQFLNQHLNPAIESDNNFTDTTKIFHDSLFNSATAENSMFLTKIAPYLQVGFMPEARSTISLSGPGAYASAYYDFINLQENTIEKTLKASDLIEFKFPENNLSQLTEQEINSLWSFDQASAKYQFEKYVRDYTGGS

SEQ ID NO: 499 - protein, 540 aa, Artificial Sequence; identical to SEQ ID NO: 473
  Synthetic amino acid sequence

SEQ ID NO: 500 - protein, 540 aa, Artificial Sequence; identical to SEQ ID NO: 473
  Synthetic amino acid sequence

SEQ ID NO: 501 - protein, 540 aa, Artificial Sequence; identical to SEQ ID NO: 473
  Synthetic amino acid sequence

SEQ ID NO: 502 - protein, 540 aa, Artificial Sequence; identical to SEQ ID NO: 473
  Synthetic amino acid sequence

SEQ ID NO: 503 - protein, 540 aa, Artificial Sequence; identical to SEQ ID NO: 473
  Synthetic amino acid sequence

SEQ ID NO: 504 - protein, 540 aa, Artificial Sequence; identical to SEQ ID NO: 473
  Synthetic amino acid sequence

SEQ ID NO: 505 - protein, 540 aa, Artificial Sequence; identical to SEQ ID NO: 473
  Synthetic amino acid sequence

SEQ ID NO: 506 - protein, 540 aa, Artificial Sequence; identical to SEQ ID NO: 473
  Synthetic amino acid sequence

SEQ ID NO: 507 - protein, 540 aa, Artificial Sequence
  Synthetic amino acid sequence
SLISKEELIKLAYSIRPRENEYKTILTNLDEYNKLTTNNNENKYLQLKKLNESIDVFMNKYKTSSRNRALSNLKKDILKEVILIKNSNTSPVEKNLHFVWIGGEVSDIALEYIKQWADINAEYNIKLWYDSEAFLVNTLKKAIVESSTTEALQLLEEEIQNPQFDNMKFYKKRMEFIYDRQKRFINYYKSQINKPTVPTIDDIIKSHLVSEYNRDETLLESYRTNSLRKINSNHGIDIRANSLFTEQELLNIYSQELLNRGNLAAASDIVRLLALKNFGGVYLDVDMLPGIHSDLFKTISRPSSIGLDRWEMIKLEAIMKYKKYINNYTSENFDKLDQQLKDNFKLIIESKSEKSEIFSKLENLNVSDLEIKIAFALGSVINQALISKQGSYLTNLVIEQVKNRYQFLNQHLNPAIESDNNFTDTTKIFHDSLFNSATAENSMFLTKIAPYLQVGFMPEARSTISLSGPGAYASAYYDFINLQENTIEKTLKASDLIEFKFPENNLSQLTEQEINSLWSFDQASAKYQFEKYVRDYTGGS

SEQ ID NO: 508 - protein, 540 aa, Artificial Sequence; identical to SEQ ID NO: 473
  Synthetic amino acid sequence

SEQ ID NO: 509 - protein, 540 aa, Artificial Sequence; identical to SEQ ID NO: 478
  Synthetic amino acid sequence

SEQ ID NO: 510 - protein, 540 aa, Artificial Sequence; identical to SEQ ID NO: 473
  Synthetic amino acid sequence

SEQ ID NO: 511 - protein, 540 aa, Artificial Sequence; identical to SEQ ID NO: 478
  Synthetic amino acid sequence

SEQ ID NO: 512 - protein, 540 aa, Artificial Sequence; identical to SEQ ID NO: 473
  Synthetic amino acid sequence

SEQ ID NO: 513 - protein, 540 aa, Artificial Sequence; identical to SEQ ID NO: 478
  Synthetic amino acid sequence

SEQ ID NO: 514 - protein, 540 aa, Artificial Sequence; identical to SEQ ID NO: 478
  Synthetic amino acid sequence

SEQ ID NO: 515 - protein, 540 aa, Artificial Sequence; identical to SEQ ID NO: 478
  Synthetic amino acid sequence

SEQ ID NO: 516 - protein, 540 aa, Artificial Sequence; identical to SEQ ID NO: 498
  Synthetic amino acid sequence

SEQ ID NO: 517 - protein, 540 aa, Artificial Sequence; identical to SEQ ID NO: 478
  Synthetic amino acid sequence

SEQ ID NO: 518 - protein, 540 aa, Artificial Sequence; identical to SEQ ID NO: 473
  Synthetic amino acid sequence

SEQ ID NO: 519 - protein, 540 aa, Artificial Sequence; identical to SEQ ID NO: 473
  Synthetic amino acid sequence

SEQ ID NO: 520 - protein, 540 aa, Artificial Sequence
  Synthetic amino acid sequence
SLISKEELIKLAYSIRPRENEYKTILTNLDEYNKLTTNNNENKYLQLKKLNESIDVFMNKYKNSSRNRALSNLKKDILKEVILIKNSNTSPVEKNLHFVWIGGEVSDIALEYIKQWADINAEYNIKLWYDSEAFLVNTLKKAIVESSTTEALQLLEEEIQNPQFDNMKFYKKRMEFIYDRQKRFINYYKSQINKPTVPTIDDIIKSHLVSEYNRDETLLESYRTNSLRKINSNHGIDIRANSLFTEQELLNIYSQELLNRGNLAAASDIVRLLALKNFGGVALAVAMLPGIHSDLFKTIPRPSSIGLDRWEMIKLEAIMKYKKYINNYTSENFDKLDQQLKDNFKLIIESKSEKSEIFSKLENLNVSDLEIKIAFALGSVINQALISKQGSYLTNLVIEQVKNRYQFLNQHLNPAIESDNNFTDTTKIFHDSLFNSATAENSMFLTKIAPYLQVGFMPEARSTISLSGPGAYASAYYDFINLQENTIEKTLKASDLIEFKFPENNLSQLTEQEINSLWSFDQASAKYQFEKYVRDYTGGS

SEQ ID NO: 521 - protein, 540 aa, Artificial Sequence; identical to SEQ ID NO: 245
  Synthetic amino acid sequence

SEQ ID NO: 522 - protein, 540 aa, Artificial Sequence; identical to SEQ ID NO: 520
  Synthetic amino acid sequence

SEQ ID NO: 523 - protein, 540 aa, Artificial Sequence; identical to SEQ ID NO: 245
  Synthetic amino acid sequence

SEQ ID NO: 524 - protein, 540 aa, Artificial Sequence; identical to SEQ ID NO: 245
  Synthetic amino acid sequence

SEQ ID NO: 525 - protein, 540 aa, Artificial Sequence; identical to SEQ ID NO: 245
  Synthetic amino acid sequence

SEQ ID NO: 526 - protein, 540 aa, Artificial Sequence
  Synthetic amino acid sequence
SLISKEELIKLAYSIRPRENEYKTILTNLDEYNKLTTNNNENKYLQLKKLNESIDVFMNKYKNSSRNRALSNLKKDILKEVILIKNSNTSPVEKNLHFVWIGGEVSDIALEYIKQWADINAEYNIKLWYDSEAFLVNTLKKAIVESSTTEALQLLEEEIQNPQFDNMKFYKKRMEFIYDRQKRFVNYYKSQINKPTVPTIDDIIKSHLVSEYNRDETLLESYRTNSLRKINSNHGIDIRANSLFTEQELLNIYSQELLNRGNLAAASDIVRLLALKNFGGVALAVAMLPGIHSDLFKTISRPSSIGLDRWEMIKLEAIMKYKKYINNYTSENFDKLDQQLKDNFKLIIESKSEKSEIFSKLENLNVSDLEIKIAFALGSVINQALISKQGSYLTNLVIEQVKNRYQFLNQHLNPAIESDNNFTDTTKIFHDSLFNSATAENSMFLTKIAPYLQVGFMPEARSTISLSGPGAYASAYYDFINLQENTIEKTLKASDLIEFKFPENNLSQLTEQEINSLWSFDQASAKYQFEKYVRDYTGGS

SEQ ID NO: 527 - protein, 540 aa, Artificial Sequence; identical to SEQ ID NO: 245
  Synthetic amino acid sequence

SEQ ID NO: 528 - protein, 540 aa, Artificial Sequence; identical to SEQ ID NO: 526
  Synthetic amino acid sequence

SEQ ID NO: 529 - protein, 540 aa, Artificial Sequence; identical to SEQ ID NO: 520
  Synthetic amino acid sequence

SEQ ID NO: 530 - protein, 540 aa, Artificial Sequence; identical to SEQ ID NO: 245
  Synthetic amino acid sequence

SEQ ID NO: 531 - protein, 540 aa, Artificial Sequence; identical to SEQ ID NO: 245
  Synthetic amino acid sequence

SEQ ID NO: 532 - protein, 540 aa, Artificial Sequence; identical to SEQ ID NO: 526
  Synthetic amino acid sequence

SEQ ID NO: 533 - protein, 540 aa, Artificial Sequence; identical to SEQ ID NO: 245
  Synthetic amino acid sequence

SEQ ID NO: 534 - protein, 540 aa, Artificial Sequence; identical to SEQ ID NO: 526
  Synthetic amino acid sequence

SEQ ID NO: 535 - protein, 540 aa, Artificial Sequence
  Synthetic amino acid sequence
SLISKEELIKLAYSIRPRENEYKTILTNLDEYNKLTTNNNENKYLQLKKLNESIDVFMNKYKNSSRNRALSNLKKDILKEVILIKNSNTSPVEKNLHFVWIGGEVSDIALEYIKQWADINAEYNIKLWYDSEAFLVNTLKKAIVESSTTEALQLLEEEIQNPQFDNTKFYKKRMEFIYDRQKRFINYYKSQINKPTVPTIDDIIKSHLVSEYNRDETLLESYRTNSLRKINSNHGIDIRANSLFTEQELLNIYSQELLNRGNLAAASDIVRLLALKNFGGVALAVAMLPGIHSDLFKTISRPSSIGLDRWEMIKLEAIMKYKKYINNYTSENFDKLDQQLKDNFKLIIESKSEKSEIFSKLENLNVSDLEIKIAFALGSVINQALISKQGSYLTNLVIEQVKNRYQFLNQHLNPAIESDNNFTDTTKIFHDSLFNSATAENSMFLTKIAPYLQVGFMPEARSTISLSGPGAYASAYYDFINLQENTIEKTLKASDLIEFKFPENNLSQLTEQEINSLWSFDQASAKYQFEKYVRDYTGGS

SEQ ID NO: 536 - protein, 540 aa, Artificial Sequence; identical to SEQ ID NO: 535
  Synthetic amino acid sequence

SEQ ID NO: 537 - protein, 540 aa, Artificial Sequence; identical to SEQ ID NO: 535
  Synthetic amino acid sequence

SEQ ID NO: 538 - protein, 540 aa, Artificial Sequence; identical to SEQ ID NO: 245
  Synthetic amino acid sequence

SEQ ID NO: 539 - protein, 540 aa, Artificial Sequence; identical to SEQ ID NO: 245
  Synthetic amino acid sequence

SEQ ID NO: 540 - protein, 540 aa, Artificial Sequence; identical to SEQ ID NO: 245
  Synthetic amino acid sequence

SEQ ID NO: 541 - protein, 540 aa, Artificial Sequence; identical to SEQ ID NO: 245
  Synthetic amino acid sequence

SEQ ID NO: 542 - protein, 540 aa, Artificial Sequence; identical to SEQ ID NO: 520
  Synthetic amino acid sequence

SEQ ID NO: 543 - protein, 540 aa, Artificial Sequence; identical to SEQ ID NO: 245
  Synthetic amino acid sequence

SEQ ID NO: 544 - protein, 540 aa, Artificial Sequence; identical to SEQ ID NO: 245
  Synthetic amino acid sequence

SEQ ID NO: 545 - protein, 540 aa, Artificial Sequence; identical to SEQ ID NO: 245
  Synthetic amino acid sequence

SEQ ID NO: 546 - protein, 540 aa, Artificial Sequence
  Synthetic amino acid sequence
SLISKEELIKLAYSIRPRENEYKTILTNLDEYNKLTTNNNENKYLQLKKLNESIDVFMNKYKTSSRNRALSNLKKDILKEVILIKNSNTSPVEKNLHFVWIGGEVSDIALEYIKQWADINAEYNIKLWYDSEAFLVNTLKKAIVESSTTEALQLLEEEIQNPQFDNMKFYKKRMEFIYDRQKRFINYYKSQINKPTVPTIDDIIKSHLVSEYNRDETVLESYRTNSLRKINSNHGIDIRANSLFTEQELLNIYSQGLLNRGNLAAASDIVRLLALKNFGGVALAVAMLPGIHSDLFKTISRPSSIGLDRWEMIKLEAIMKYKKYINNYTSENFDKLDQQLKDNFKLIIESKSEKSEIFSKLENLNVSDLEIKIAFALGSVINQALISKQGSYLTNLVIEQVKNRYQFLNQHLNPAIESDNNFTDTTKIFHDSLFNSATAENSMFLTKIAPYLQVGFMPEARSTISLSGPGAYASAYYDFINLQENTIEKTLKASDLIEFKFPENNLSQLTEQEINSLWSFDQASAKYQFEKYVRDYTGGS

SEQ ID NO: 547 - protein, 540 aa, Artificial Sequence; identical to SEQ ID NO: 245
  Synthetic amino acid sequence

SEQ ID NO: 548 - protein, 540 aa, Artificial Sequence; identical to SEQ ID NO: 245
  Synthetic amino acid sequence

SEQ ID NO: 549 - protein, 540 aa, Artificial Sequence; identical to SEQ ID NO: 245
  Synthetic amino acid sequence

SEQ ID NO: 550 - protein, 540 aa, Artificial Sequence; identical to SEQ ID NO: 245
  Synthetic amino acid sequence

SEQ ID NO: 551 - protein, 540 aa, Artificial Sequence; identical to SEQ ID NO: 245
  Synthetic amino acid sequence

SEQ ID NO: 552 - protein, 540 aa, Artificial Sequence; identical to SEQ ID NO: 245
  Synthetic amino acid sequence

SEQ ID NO: 553 - protein, 540 aa, Artificial Sequence; identical to SEQ ID NO: 245
  Synthetic amino acid sequence

SEQ ID NO: 554 - protein, 540 aa, Artificial Sequence; identical to SEQ ID NO: 245
  Synthetic amino acid sequence

SEQ ID NO: 555 - protein, 540 aa, Artificial Sequence
  Synthetic amino acid sequence
SLISKEELIKLAYSIRPRENEYKTILTNLDEYNKLTTNNNENKYLQLKKLNESIDVFMNKYKTSSRNRALSNLKKDILKEVILIKNSNTSPVEKNLHFVWIGGEVSDIALEYIKQWADINAEYNIKLWYDSEAFLVNTLKKAIVESSTTEALQLLEEEIQNPQFDNMKFYKKRMEFIYDRQKRFINYYKSQINKPTVPTIDDIIKSHLVSEYNRDETLLESYRTNSLRKINSNHGIDIRANSLFTEQELLNIYSQELLNRGNLAAASDIVRLLALKNFGGVALAVAMLPGIHSDLFKTISRPSSIGLDRWEMIKLEAIMKYKKYINNYTSENFDKLDQQLKDNFKLIIESKSEKSEIFSKLENLNVSDLEIKIAFALGSVINQALISKQGSYLTNLVIEQVKNRYQFLNQHLNPAIESDNNFTDTTKIFHDSLFNSATAENSMFLTKIAPYLQVGFMPEARSTISLSGPGAYASAYYDFINLQENTIEKTLKASDLIEFKFPENNLSQLTEQEINSLWSFDQASAKYQFEKYVRDYTGGS

SEQ ID NO: 556 - protein, 540 aa, Artificial Sequence; identical to SEQ ID NO: 245
  Synthetic amino acid sequence

SEQ ID NO: 557 - protein, 540 aa, Artificial Sequence; identical to SEQ ID NO: 526
  Synthetic amino acid sequence

SEQ ID NO: 558 - protein, 540 aa, Artificial Sequence; identical to SEQ ID NO: 245
  Synthetic amino acid sequence

SEQ ID NO: 559 - protein, 540 aa, Artificial Sequence; identical to SEQ ID NO: 526
  Synthetic amino acid sequence

SEQ ID NO: 560 - protein, 540 aa, Artificial Sequence; identical to SEQ ID NO: 245
  Synthetic amino acid sequence

SEQ ID NO: 561 - protein, 540 aa, Artificial Sequence; identical to SEQ ID NO: 526
  Synthetic amino acid sequence

SEQ ID NO: 562 - protein, 540 aa, Artificial Sequence; identical to SEQ ID NO: 526
  Synthetic amino acid sequence

SEQ ID NO: 563 - protein, 540 aa, Artificial Sequence; identical to SEQ ID NO: 526
  Synthetic amino acid sequence

SEQ ID NO: 564 - protein, 540 aa, Artificial Sequence; identical to SEQ ID NO: 546
  Synthetic amino acid sequence

SEQ ID NO: 565 - protein, 540 aa, Artificial Sequence; identical to SEQ ID NO: 526
  Synthetic amino acid sequence

SEQ ID NO: 566 - protein, 540 aa, Artificial Sequence; identical to SEQ ID NO: 245
  Synthetic amino acid sequence

SEQ ID NO: 567 - protein, 540 aa, Artificial Sequence; identical to SEQ ID NO: 245
  Synthetic amino acid sequence

SEQ ID NO: 568 - protein, 542 aa, Artificial Sequence
  Synthetic amino acid sequence
SLVNRKQLEKMANVRFRVQEDEYVAILDALEEYHNMSENTVVEKYLKLKDINSLTDIYIDTYKKSGRNKALKKFKEYLVTEVLELKNNNLTPVEKNLHFVWIGGQINDTAINYINQWKDVNSDYNVNVFYDSNAFLINTLKKTIVESATNDTLESFRENLNDPRFDYNKFYRKRMEIIYDKQKNFINYYKTQREENPDLIIDDIVKIYLSNEYSKDIDELNSYIEESLNKVTENSGNDVRNFEEFKGGESFKLYEQELVERWNLAAASDILRISALKEVGGVYLDVDMLPGIQPDLFESIEKPSSVTVDFWEMVKLEAIMKYKEYIPGYTSEHFDMLDEEVQSSFESVLASKSDKSEIFSSLGDMEASPLEVKIAFNSKGIINQGLISVKDSYCSNLIVKQIENRYKILNNSLNPAISEDNDFNTTTNAFIDSIMAEANADNGRFMMELGKYLRVGFFPDVKTTINLSGPEAYAAAYQDLLMFKEGSMNIHLIEADLRNFEISKTNISQSTEQEMASLWSFDDARAKAQFEEYKKNYFEGSL

SEQ ID NO: 569 - protein, 542 aa, Artificial Sequence
  Synthetic amino acid sequence
SLVNRKQLEKMANVRFRTQEDEYVAILDALEEYHNMSENTVVEKYLKLKDINSLTDIYIDTYKKSGRNKALKKFKEYLVTEVLELKNNNLTPVEKNLHFVWIGGQINDTAINYINQWKDVNSDYNVNVFYDSNAFLINTLKKTVVESAINDTLESFRENLNDPRFDYNKFFRKRMEIIYDKQKNFINYYKAQREENPELIIDDIVKTYLSNEYSKEIDELNTYIEESLNKITQNSGNDVRNFEEFKNGESFNLYEQELVERWNLAAASDILRISALKEIGGMYLDVDMLPGIQPDLFESIEKPSSVTVDFWEMTKLEAIMKYKEYIPEYTSEHFDMLDEEVQSSFESVLASKSDKSEIFSSLGDMEASPLEVKIAFNSKGIINQGLISVKDSYCSNLIVKQIENRYKILNNSLNPAISEDNDFNTTTNTFIDSIMAEANADNGRFMMELGKYLRVGFFPDVKTTINLSGPEAYAAAYQDLLMFKEGSMNIHLIEADLRNFEISKTNISQSTEQEMASLWSFDDARAKAQFEEYKRNYFEGSL

SEQ ID NO: 570 - protein, 542 aa, Artificial Sequence; identical to SEQ ID NO: 568
  Synthetic amino acid sequence

SEQ ID NO: 571 - protein, 542 aa, Artificial Sequence; identical to SEQ ID NO: 569
  Synthetic amino acid sequence

SEQ ID NO: 572 - protein, 542 aa, Artificial Sequence; identical to SEQ ID NO: 569
  Synthetic amino acid sequence

SEQ ID NO: 573 - protein, 542 aa, Artificial Sequence; identical to SEQ ID NO: 569
  Synthetic amino acid sequence

SEQ ID NO: 574 - protein, 542 aa, Artificial Sequence
  Synthetic amino acid sequence
SLVNRKQLEKMANVRFRTQEDEYVAILDALEEYHNMSENTVVEKYLKLKDINSLTDIYIDTYKKSGRNKALKKFKEYLVTEVLELKNNNLTPVEKNLHFVWIGGQINDTAINYINQWKDVNSDYNVNVFYDSNAFLINTLKKTIVESAINDTLESFRENLNNPRFDYNKFFRKRMEIIYDKQKNFINYYKAQREENPELIIDDIVKIYLSNEYSKEIDELNTYIEESLNKIKQNSGNDVRNFEEFKNGESFKLYEQELVERWNLAAASDILRISALKEIGGMYLDVDMLPGIQPDLFESIEKPSSVTVDFWEMTKLEAIMKYKEYIPGYTSEHFDMLDEEVQSSFESALASKSDKSEIFSSLGDMEASPLEVKIAFNSKGIINQGLISVKDSYCSNLIVKQIENRYKILNNSLNPAISEDNDFNTTTNTFIDSIMAEANADNGRFMMELGKYLRVGFFPDVKTTVNLSGPEAYAAAYQDLLMFKEGSMNIHLIEADLRNFEISKTNISQSTEQEMASLWTFDDARAKVQFEEYKRNYFEGSL

SEQ ID NO: 575 - protein, 542 aa, Artificial Sequence; identical to SEQ ID NO: 569
  Synthetic amino acid sequence

SEQ ID NO: 576 - protein, 542 aa, Artificial Sequence; identical to SEQ ID NO: 574
  Synthetic amino acid sequence

SEQ ID NO: 577 - protein, 542 aa, Artificial Sequence; identical to SEQ ID NO: 568
  Synthetic amino acid sequence

SEQ ID NO: 578 - protein, 542 aa, Artificial Sequence
  Synthetic amino acid sequence
SLVNRKQLEKMANVRFRTQEDEYVAILDALEEYHNMSENTVVEKYLKLKDINSLTDIYIDTYKKSGRNKALKKFKEYLVTEVLELKNNNLTPVEKNLHFVWIGGQINDTAINYINQWKDVNSDYNVNVFYDSNAFLINTLKKTVVESAINDTLESFRENLNDPRFDYNKFFRKRMEIIYDKQKNFINYYKAQREENPELIIDDIVKTYLSNEYSKEIDELNTYIEESLNKITQNSGNDVRNFEEFKNGESFNLYEQELVERWNLAAASDILRISALKEIGGMYLDVDMLPGIQPDLFESIEKPSSVTVDFWEMTKLEAIMKYKEYIPEYTSEHFDMLDEEVQSSFESVLASKSDKSEIFSSLGDMEASPLEVKIAFNSKGIINQGLISVKDSYCSNLIVKQIENRYKILNNSLNPAISEDNDFNTTTNTFIDSIMAEANADNGRFMMELGKYLRVGFFPDVKTTINLSGPEAYAAAYQDLLMFKEGSMNIHLIEADLRNFEIFKTNISQSTEQEMASLWSFDDARAKAQFEEYKRNYFEGSL

SEQ ID NO: 579 - protein, 543 aa, Artificial Sequence
  Synthetic amino acid sequence
SLVNRKQLEKMANVRFRVQEDEYVAILDALEEYHNMSENTVVEKYLKLKDINSLTDTYIDTYKKSGRNKALKKFKEYLVIEILELKNSNLTPVEKNLHFIWIGGQINDTAINYINQWKDVNSDYNVNVFYDSNAFLINTLKKTIIESASNDTLESFRENLNDPEFNHTAFFRKRMQIIYDKQQNFINYYKAQKEENPDLIIDDIVKTYLSNEYSKDIDELNAYIEESLNKVTENSGNDVRNFEEFKTGEVFNLYEQELVERWNLAGASDILRVAILKNIGGVYLDVDMLPGIHPDLFKDINKPDSVKTAVDWEEMQLEAIMKHKEYIPEYTSKHFDTLDEEVQSSFESVLASKSDKSEIFLPLGDIEVSPLEVKIAFAKGSIINQALISAKDSYCSDLLIKQIQNRYKILNDTLGPIISQGNDFNTTMNNFGESLGAIANEENISFIAKIGSYLRVGFYPEANTTITLSGPTIYAGAYKDLLTFKEMSIDTSILSSELRNFEFPKVNISQATEQEKNSLWQFNEERAKIQFEEYKKNYFEGAL

SEQ ID NO: 580 - protein, 542 aa, Artificial Sequence; identical to SEQ ID NO: 569
  Synthetic amino acid sequence

SEQ ID NO: 581 - protein, 542 aa, Artificial Sequence; identical to SEQ ID NO: 574
  Synthetic amino acid sequence

SEQ ID NO: 582 - protein, 542 aa, Artificial Sequence; identical to SEQ ID NO: 569
  Synthetic amino acid sequence

SEQ ID NO: 583 - protein, 542 aa, Artificial Sequence; identical to SEQ ID NO: 574
  Synthetic amino acid sequence

SEQ ID NO: 584 - protein, 543 aa, Artificial Sequence
  Synthetic amino acid sequence
SLVNRKQLEKMANVRFRVQEDEYVAILDALEEYHNMSENTVVEKYLKLKDINSLTDTYIDTYKKSGRNKALKKFKEYLVTEILELKNSNLTPVEKNLHFIWIGGQINDTAINYINQWKDVNSDYNVNVFYDSNAFLINTLKKTIIESASNDTLESFRENLNDPEFNHTAFFRKRMQIIYDKQQNFINYYKAQKEENPDLIIDDIVKTYLSNEYSKDIDELNAYIEESLNKVTENSGNDVRNFEEFKTGEVFNLYEQELVERWNLAGASDILRVAILKNIGGVYLDVDMLPGIHPDLFKDINKPDSVKTAVDWEEMQLEAIMKYKEYIPEYTSKHFDTLDEEVQSSFESVLASKSDKSEIFLPLGDIEVSPLEVKIAFAKGSIINQALISAKDSYCSDLLIKQIQNRYKILNDTLGPIISQGNDFNTTMNNFGESLGAIANEENISFIAKIGSYLRVGFYPEANTTITLSGPTIYAGAYKDLLTFKEMSIDTSILSSELRNFEFPKVNISQATEQEKNSLWQFNEERAKIQFEEYKKNYFEGAL

SEQ ID NO: 585 - protein, 543 aa, Artificial Sequence; identical to SEQ ID NO: 584
  Synthetic amino acid sequence

SEQ ID NO: 586 - protein, 543 aa, Artificial Sequence; identical to SEQ ID NO: 584
  Synthetic amino acid sequence

SEQ ID NO: 587 - protein, 542 aa, Artificial Sequence; identical to SEQ ID NO: 569
  Synthetic amino acid sequence

SEQ ID NO: 588 - protein, 542 aa, Artificial Sequence; identical to SEQ ID NO: 569
  Synthetic amino acid sequence

SEQ ID NO: 589 - protein, 542 aa, Artificial Sequence; identical to SEQ ID NO: 569
  Synthetic amino acid sequence

SEQ ID NO: 590 - protein, 542 aa, Artificial Sequence; identical to SEQ ID NO: 569
  Synthetic amino acid sequence

SEQ ID NO: 591 - protein, 542 aa, Artificial Sequence; identical to SEQ ID NO: 568
  Synthetic amino acid sequence

SEQ ID NO: 592 - protein, 542 aa, Artificial Sequence; identical to SEQ ID NO: 569
  Synthetic amino acid sequence

SEQ ID NO: 593 - protein, 542 aa, Artificial Sequence; identical to SEQ ID NO: 569
  Synthetic amino acid sequence

SEQ ID NO: 594 - protein, 542 aa, Artificial Sequence
  Synthetic amino acid sequence
SLVNRKQLEKMANVRFRTQEDEYVAILDALEEYHNMSENTVVEKYLKLKDINSLTDIYIDTYKKSGRNKALKKFKEYLVTEVLELKNNNLTPVEKNLHFVWIGGQINDTAINYINQWKDVNSDYNVNVFYDSNAFLINTLKKTVVESAINDTLESFRENLNDPRFDYNKFFRKRMEIIYDKQKNFINYYKAQREENPELIIDDIVKTYLSNEYSKEIDELNTYIEESLNKITQNSGNDVRNFEEFKNGESFNLYEQELVERWNLAAASDILRISALKEIGGMYLDVDMLPGIQPGLFESIEKPSSVTVDFWEMTKLEAIMKYKEYIPEYTSEHFDMLDEEVQSSFESVLASKSDKSEIFSSLGDMEASPLEVKIAFNSKGIINQGLISVKDSYCSNLIVKQIENRYKILNNSLNPAISEDNDFNTTTNTFIDSIMAEANADNGRFMMELGKYLRVGFFPDVKTTINLSGPEAYAAAYQDLLMFKEGSMNIHLIEADLRNFEISKTNISQSTEQEMASLWSFDDARAKAQFEEYKRNYFEGSL

SEQ ID NO: 595 - protein, 542 aa, Artificial Sequence; identical to SEQ ID NO: 594
  Synthetic amino acid sequence

SEQ ID NO: 596 - protein, 542 aa, Artificial Sequence; identical to SEQ ID NO: 569
  Synthetic amino acid sequence

SEQ ID NO: 597 - protein, 542 aa, Artificial Sequence; identical to SEQ ID NO: 569
  Synthetic amino acid sequence

SEQ ID NO: 598 - protein, 543 aa, Artificial Sequence; identical to SEQ ID NO: 579
  Synthetic amino acid sequence

SEQ ID NO: 599 - protein, 542 aa, Artificial Sequence
  Synthetic amino acid sequence
SLVNRKQLEKMANVRFRTQEDEYVAILDALEEYHNMSENTVVEKYLKLKDINSLTDIYIDTYKKSGRNKALKKFKEYLVTEVLELKNNNLTPVEKNLHFVWIGGQINDTAINYINQWKDVNSDYNVNVFYDSNAFLINTLKKTVVESAINDTLESFRENLNDPRFDYNKFFRKRMEIIYDKQKNFINYYKAQREENPELIIDDIVKTYLSNEYSKEIDELNTYIEESLNKITQNSGNDVRNFEEFKNGESFNLYEQELVERWNLAAASDILRISALKEIGGMYLDVDMLPGIQPDLFESIEKPSSVTVDFWEMTKLEAIMKYKEYIPEYTSEHFDMLDEEVQSSFESVLASKSDKSEIFSSLGDMEASPLEVKIAFNSKGIINQGLISVKDSYCSNLIVKQIENRYKILNNSLNPAISEDNDFNTTTNTFIDSIMAEANADNGRFMMELGKYLRVGFFPDVKTTINLSGPEAYAAAYQDLLMFKEGSMNIHLIEADLRNFEISKTNISQSTEQEMASLWSFDDSRAKAQFEEYKRNYFEGSL

SEQ ID NO: 600 - protein, 542 aa, Artificial Sequence; identical to SEQ ID NO: 599
  Synthetic amino acid sequence

SEQ ID NO: 601 - protein, 542 aa, Artificial Sequence; identical to SEQ ID NO: 599
  Synthetic amino acid sequence

SEQ ID NO: 602 - protein, 542 aa, Artificial Sequence
  Synthetic amino acid sequence
SLVNRKQLEKMANVRFRTQEDEYVAILDALEEYHNMSENTVVEKYLKLKDINSLTDIYIDTYKKSGRNKALKKFKEYLVTEVLELKNNNLTPVEKNLHFVWIGGQINDTAINYINQWKDVNSDYNVNVFYDSNAFLINTLKKTVVESAINDTLESFRENLNDPRFDYNKFFRKRMEIIYDKQKNFINYYKAQREENPELIIDDIVKTYLSNEYSKEIDELNTYIEESLNKITQNSGNDVRNFEEFKNGESFNLYEQELVERWNLAAASDILRISALKEIGGMYLDVDMLPGIQPDLFESIEKPSSVTVDFWEMTKLEAIMKYKEYIPEYTSEHFDMLDEEVQSSFESVLASKSDKSEIFSSLGDMEASPLEVKIAFNSKGIINQGLISVKDSYCSNLIVKQIENRYKILNNSLNPAISEDNDFNTTTNTFIDSIMAEANADNGRFMMELGKYLRVGFFPDVKTTINLSGPEAYAAAYQDLLMFKEGSMNIHLIEADLRNFEIFKTNISQSTEQEMASLWSFDDSRAKAQFEEYKRNYFEGSL

SEQ ID NO: 603 - protein, 542 aa, Artificial Sequence; identical to SEQ ID NO: 602
  Synthetic amino acid sequence

SEQ ID NO: 604 - protein, 542 aa, Artificial Sequence; identical to SEQ ID NO: 569
  Synthetic amino acid sequence

SEQ ID NO: 605 - protein, 542 aa, Artificial Sequence; identical to SEQ ID NO: 594
  Synthetic amino acid sequence

SEQ ID NO: 606 - protein, 542 aa, Artificial Sequence
  Synthetic amino acid sequence
SLVNRKQLEKMANVRFRTQEDEYVAILDALEEYHNMSENTVVEKYLKLKDINSLTDIYIDTYKKSGRNKALKKFKEYLVTEVLELKNNNLTPVEKNLHFVWIGGQINDTAINYINQWKDVNSDYNVNVFYDSNAFLINTLKKTIVESAINDTLESFRENLNNPRFDYNKFFRKRMEIIYDKQKNFINYYKAQREENPELIIDDIVKIYLSNEYSKEIDELNTYIEESLNKIKQNSGNDVRNFEEFKNGESFKLYEQELVERWNLAAASDILRISALKEIGGMYLDVDMLPGIQPGLFESIEKPSSVTVDFWEMTKLEAIMKYKEYIPGYTSEHFDMLDEEVQSSFESALASKSDKSEIFSSLGDMEASPLEVKIAFNSKGIINQGLISVKDSYCSNLIVKQIENRYKILNNSLNPAISEDNDFNTTTNTFIDSIMAEANADNGRFMMELGKYLRVGFFPDVKTTVNLSGPEAYAAAYQDLLMFKEGSMNIHLIEADLRNFEISKTNISQSTEQEMASLWTFDDARAKVQFEEYKRNYFEGSL

SEQ ID NO: 607 - protein, 542 aa, Artificial Sequence; identical to SEQ ID NO: 606
  Synthetic amino acid sequence

SEQ ID NO: 608 - protein, 542 aa, Artificial Sequence; identical to SEQ ID NO: 574
  Synthetic amino acid sequence

SEQ ID NO: 609 - protein, 542 aa, Artificial Sequence; identical to SEQ ID NO: 606
  Synthetic amino acid sequence

SEQ ID NO: 610 - protein, 542 aa, Artificial Sequence; identical to SEQ ID NO: 574
  Synthetic amino acid sequence

SEQ ID NO: 611 - protein, 542 aa, Artificial Sequence; identical to SEQ ID NO: 574
  Synthetic amino acid sequence

SEQ ID NO: 612 - protein, 542 aa, Artificial Sequence; identical to SEQ ID NO: 574
  Synthetic amino acid sequence

SEQ ID NO: 613 - protein, 542 aa, Artificial Sequence; identical to SEQ ID NO: 606
  Synthetic amino acid sequence

SEQ ID NO: 614 - protein, 542 aa, Artificial Sequence; identical to SEQ ID NO: 574
  Synthetic amino acid sequence

SEQ ID NO: 615 - protein, 542 aa, Artificial Sequence
  Synthetic amino acid sequence
SLVNRKQLEKMANVRFRTQEDEYVAILDALEEYHNMSENTVVEKYLKLKDINSLTDIYIDTYKKSGRNKALKKFKEYLVIEVLELKNNNLTPVEKNLHFVWIGGQINDTAINYINQWKDVNSDYNVNVFYDSNAFLINTLKKTIVESAINDTLESFRENLNNPRFDYNKFFRKRMEIIYDKQKNFINYYKAQREENPELIIDDIVKIYLSNEYSKEIDELNTYIEESLNKIKQNSGNDVRNFEEFKNGESFKLYEQELVERWNLAAASDILRISALKEIGGMYLDVDMLPGIQPGLFESIEKPSSVTVDFWEMTKLEAIMKYKEYIPGYTSEHFDMLDEEVQSSFESALASKSDKSEIFSSLGDMEASPLEVKIAFNSKGIINQGLISVKDSYCSNLIVKQIENRYKILNNSLNPAISEDNDFNTTTNTFIDSIMAEANADNGRFMMELGKYLRVGFFPDVKTTVNLSGPEAYAAAYQDLLMFKEGSMNIHLIEADLRNFEISKTNISQSTEQEMASLWTFDDARAKVQFEEYKRNYFEGSL

SEQ ID NO: 616 - protein, 542 aa, Artificial Sequence
  Synthetic amino acid sequence
SLVNRKQLEKMANVRFRVQEDEYVAILDALEEYHNMSENTVVEKYLKLKDINSLTDIYIDTYKKSGRNKALKKFKEYLVTEVLELKNNNLTPVEKNLHFVWIGGQINDTAINYINQWKDVNSDYNVNVFYDSNAFLINTLKKTIVESATNDTLESFRENLNDPRFDYNKFYRKRMEIIYDKQKNFINYYKTQREENPDLIIDDIVKIYLSNEYSKDIDELNSYIEESLNKVTENSGNDVRNFEEFKGGESFKLYEQELVERWNLAAASAILAISALKEVGGVALAVAMLPGIQPDLFESIEKPSSVTVDFWEMVKLEAIMKYKEYIPGYTSEHFDMLDEEVQSSFESVLASKSDKSEIFSSLGDMEASPLEVKIAFNSKGIINQGLISVKDSYCSNLIVKQIENRYKILNNSLNPAISEDNDFNTTTNAFIDSIMAEANADNGRFMMELGKYLRVGFFPDVKTTINLSGPEAYAAAYQDLLMFKEGSMNIHLIEADLRNFEISKTNISQSTEQEMASLWSFDDARAKAQFEEYKKNYFEGSL

SEQ ID NO: 617 - protein, 542 aa, Artificial Sequence; identical to SEQ ID NO: 247
  Synthetic amino acid sequence

SEQ ID NO: 618 - protein, 542 aa, Artificial Sequence; identical to SEQ ID NO: 616
  Synthetic amino acid sequence

SEQ ID NO: 619 - protein, 542 aa, Artificial Sequence; identical to SEQ ID NO: 247
  Synthetic amino acid sequence

SEQ ID NO: 620 - protein, 542 aa, Artificial Sequence; identical to SEQ ID NO: 247
  Synthetic amino acid sequence

SEQ ID NO: 621 - protein, 542 aa, Artificial Sequence; identical to SEQ ID NO: 247
  Synthetic amino acid sequence

SEQ ID NO: 622 - protein, 542 aa, Artificial Sequence
  Synthetic amino acid sequence
SLVNRKQLEKMANVRFRTQEDEYVAILDALEEYHNMSENTVVEKYLKLKDINSLTDIYIDTYKKSGRNKALKKFKEYLVTEVLELKNNNLTPVEKNLHFVWIGGQINDTAINYINQWKDVNSDYNVNVFYDSNAFLINTLKKTIVESAINDTLESFRENLNNPRFDYNKFFRKRMEIIYDKQKNFINYYKAQREENPELIIDDIVKIYLSNEYSKEIDELNTYIEESLNKIKQNSGNDVRNFEEFKNGESFKLYEQELVERWNLAAASAILAISALKEIGGMALAVAMLPGIQPDLFESIEKPSSVTVDFWEMTKLEAIMKYKEYIPGYTSEHFDMLDEEVQSSFESALASKSDKSEIFSSLGDMEASPLEVKIAFNSKGIINQGLISVKDSYCSNLIVKQIENRYKILNNSLNPAISEDNDFNTTTNTFIDSIMAEANADNGRFMMELGKYLRVGFFPDVKTTVNLSGPEAYAAAYQDLLMFKEGSMNIHLIEADLRNFEISKTNISQSTEQEMASLWTFDDARAKVQFEEYKRNYFEGSL

SEQ ID NO: 623 - protein, 542 aa, Artificial Sequence; identical to SEQ ID NO: 247
  Synthetic amino acid sequence

SEQ ID NO: 624 - protein, 542 aa, Artificial Sequence; identical to SEQ ID NO: 622
  Synthetic amino acid sequence

SEQ ID NO: 625 - protein, 542 aa, Artificial Sequence; identical to SEQ ID NO: 616
  Synthetic amino acid sequence

SEQ ID NO: 626 - protein, 542 aa, Artificial Sequence
  Synthetic amino acid sequence
SLVNRKQLEKMANVRFRTQEDEYVAILDALEEYHNMSENTVVEKYLKLKDINSLTDIYIDTYKKSGRNKALKKFKEYLVTEVLELKNNNLTPVEKNLHFVWIGGQINDTAINYINQWKDVNSDYNVNVFYDSNAFLINTLKKTVVESAINDTLESFRENLNDPRFDYNKFFRKRMEIIYDKQKNFINYYKAQREENPELIIDDIVKTYLSNEYSKEIDELNTYIEESLNKITQNSGNDVRNFEEFKNGESFNLYEQELVERWNLAAASAILAISALKEIGGMALAVAMLPGIQPDLFESIEKPSSVTVDFWEMTKLEAIMKYKEYIPEYTSEHFDMLDEEVQSSFESVLASKSDKSEIFSSLGDMEASPLEVKIAFNSKGIINQGLISVKDSYCSNLIVKQIENRYKILNNSLNPAISEDNDFNTTTNTFIDSIMAEANADNGRFMMELGKYLRVGFFPDVKTTINLSGPEAYAAAYQDLLMFKEGSMNIHLIEADLRNFEIFKTNISQSTEQEMASLWSFDDARAKAQFEEYKRNYFEGSL

SEQ ID NO: 627 - protein, 543 aa, Artificial Sequence
  Synthetic amino acid sequence
SLVNRKQLEKMANVRFRVQEDEYVAILDALEEYHNMSENTVVEKYLKLKDINSLTDTYIDTYKKSGRNKALKKFKEYLVIEILELKNSNLTPVEKNLHFIWIGGQINDTAINYINQWKDVNSDYNVNVFYDSNAFLINTLKKTIIESASNDTLESFRENLNDPEFNHTAFFRKRMQIIYDKQQNFINYYKAQKEENPDLIIDDIVKTYLSNEYSKDIDELNAYIEESLNKVTENSGNDVRNFEEFKTGEVFNLYEQELVERWNLAGASAILAVAILKNIGGVALAVAMLPGIHPDLFKDINKPDSVKTAVDWEEMQLEAIMKHKEYIPEYTSKHFDTLDEEVQSSFESVLASKSDKSEIFLPLGDIEVSPLEVKIAFAKGSIINQALISAKDSYCSDLLIKQIQNRYKILNDTLGPIISQGNDFNTTMNNFGESLGAIANEENISFIAKIGSYLRVGFYPEANTTITLSGPTIYAGAYKDLLTFKEMSIDTSILSSELRNFEFPKVNISQATEQEKNSLWQFNEERAKIQFEEYKKNYFEGAL

SEQ ID NO: 628 - protein, 542 aa, Artificial Sequence; identical to SEQ ID NO: 247
  Synthetic amino acid sequence

SEQ ID NO: 629 - protein, 542 aa, Artificial Sequence; identical to SEQ ID NO: 622
  Synthetic amino acid sequence

SEQ ID NO: 630 - protein, 542 aa, Artificial Sequence; identical to SEQ ID NO: 247
  Synthetic amino acid sequence

SEQ ID NO: 631 - protein, 542 aa, Artificial Sequence; identical to SEQ ID NO: 622
  Synthetic amino acid sequence

SEQ ID NO: 632 - protein, 543 aa, Artificial Sequence
  Synthetic amino acid sequence
SLVNRKQLEKMANVRFRVQEDEYVAILDALEEYHNMSENTVVEKYLKLKDINSLTDTYIDTYKKSGRNKALKKFKEYLVTEILELKNSNLTPVEKNLHFIWIGGQINDTAINYINQWKDVNSDYNVNVFYDSNAFLINTLKKTIIESASNDTLESFRENLNDPEFNHTAFFRKRMQIIYDKQQNFINYYKAQKEENPDLIIDDIVKTYLSNEYSKDIDELNAYIEESLNKVTENSGNDVRNFEEFKTGEVFNLYEQELVERWNLAGASAILAVAILKNIGGVALAVAMLPGIHPDLFKDINKPDSVKTAVDWEEMQLEAIMKYKEYIPEYTSKHFDTLDEEVQSSFESVLASKSDKSEIFLPLGDIEVSPLEVKIAFAKGSIINQALISAKDSYCSDLLIKQIQNRYKILNDTLGPIISQGNDFNTTMNNFGESLGAIANEENISFIAKIGSYLRVGFYPEANTTITLSGPTIYAGAYKDLLTFKEMSIDTSILSSELRNFEFPKVNISQATEQEKNSLWQFNEERAKIQFEEYKKNYFEGAL

SEQ ID NO: 633 - protein, 543 aa, Artificial Sequence; identical to SEQ ID NO: 632
  Synthetic amino acid sequence

SEQ ID NO: 634 - protein, 543 aa, Artificial Sequence; identical to SEQ ID NO: 632
  Synthetic amino acid sequence

SEQ ID NO: 635 - protein, 542 aa, Artificial Sequence; identical to SEQ ID NO: 247
  Synthetic amino acid sequence

SEQ ID NO: 636 - protein, 542 aa, Artificial Sequence; identical to SEQ ID NO: 247
  Synthetic amino acid sequence

SEQ ID NO: 637 - protein, 542 aa, Artificial Sequence; identical to SEQ ID NO: 247
  Synthetic amino acid sequence

SEQ ID NO: 638 - protein, 542 aa, Artificial Sequence; identical to SEQ ID NO: 247
  Synthetic amino acid sequence

SEQ ID NO: 639 - protein, 542 aa, Artificial Sequence; identical to SEQ ID NO: 616
  Synthetic amino acid sequence

SEQ ID NO: 640 - protein, 542 aa, Artificial Sequence; identical to SEQ ID NO: 247
  Synthetic amino acid sequence

SEQ ID NO: 641 - protein, 542 aa, Artificial Sequence; identical to SEQ ID NO: 247
  Synthetic amino acid sequence

SEQ ID NO: 642 - protein, 542 aa, Artificial Sequence
  Synthetic amino acid sequence
SLVNRKQLEKMANVRFRTQEDEYVAILDALEEYHNMSENTVVEKYLKLKDINSLTDIYIDTYKKSGRNKALKKFKEYLVTEVLELKNNNLTPVEKNLHFVWIGGQINDTAINYINQWKDVNSDYNVNVFYDSNAFLINTLKKTVVESAINDTLESFRENLNDPRFDYNKFFRKRMEIIYDKQKNFINYYKAQREENPELIIDDIVKTYLSNEYSKEIDELNTYIEESLNKITQNSGNDVRNFEEFKNGESFNLYEQELVERWNLAAASAILAISALKEIGGMALAVAMLPGIQPGLFESIEKPSSVTVDFWEMTKLEAIMKYKEYIPEYTSEHFDMLDEEVQSSFESVLASKSDKSEIFSSLGDMEASPLEVKIAFNSKGIINQGLISVKDSYCSNLIVKQIENRYKILNNSLNPAISEDNDFNTTTNTFIDSIMAEANADNGRFMMELGKYLRVGFFPDVKTTINLSGPEAYAAAYQDLLMFKEGSMNIHLIEADLRNFEISKTNISQSTEQEMASLWSFDDARAKAQFEEYKRNYFEGSL

SEQ ID NO: 643 - protein, 542 aa, Artificial Sequence; identical to SEQ ID NO: 642
  Synthetic amino acid sequence

SEQ ID NO: 644 - protein, 542 aa, Artificial Sequence; identical to SEQ ID NO: 247
  Synthetic amino acid sequence

SEQ ID NO: 645 - protein, 542 aa, Artificial Sequence; identical to SEQ ID NO: 247
  Synthetic amino acid sequence

SEQ ID NO: 646 - protein, 543 aa, Artificial Sequence; identical to SEQ ID NO: 627
  Synthetic amino acid sequence

SEQ ID NO: 647 - protein, 542 aa, Artificial Sequence
  Synthetic amino acid sequence
SLVNRKQLEKMANVRFRTQEDEYVAILDALEEYHNMSENTVVEKYLKLKDINSLTDIYIDTYKKSGRNKALKKFKEYLVTEVLELKNNNLTPVEKNLHFVWIGGQINDTAINYINQWKDVNSDYNVNVFYDSNAFLINTLKKTVVESAINDTLESFRENLNDPRFDYNKFFRKRMEIIYDKQKNFINYYKAQREENPELIIDDIVKTYLSNEYSKEIDELNTYIEESLNKITQNSGNDVRNFEEFKNGESFNLYEQELVERWNLAAASAILAISALKEIGGMALAVAMLPGIQPDLFESIEKPSSVTVDFWEMTKLEAIMKYKEYIPEYTSEHFDMLDEEVQSSFESVLASKSDKSEIFSSLGDMEASPLEVKIAFNSKGIINQGLISVKDSYCSNLIVKQIENRYKILNNSLNPAISEDNDFNTTTNTFIDSIMAEANADNGRFMMELGKYLRVGFFPDVKTTINLSGPEAYAAAYQDLLMFKEGSMNIHLIEADLRNFEISKTNISQSTEQEMASLWSFDDSRAKAQFEEYKRNYFEGSL

SEQ ID NO: 648 - protein, 542 aa, Artificial Sequence; identical to SEQ ID NO: 647
  Synthetic amino acid sequence

SEQ ID NO: 649 - protein, 542 aa, Artificial Sequence; identical to SEQ ID NO: 647
  Synthetic amino acid sequence

SEQ ID NO: 650 - protein, 542 aa, Artificial Sequence
  Synthetic amino acid sequence
SLVNRKQLEKMANVRFRTQEDEYVAILDALEEYHNMSENTVVEKYLKLKDINSLTDIYIDTYKKSGRNKALKKFKEYLVTEVLELKNNNLTPVEKNLHFVWIGGQINDTAINYINQWKDVNSDYNVNVFYDSNAFLINTLKKTVVESAINDTLESFRENLNDPRFDYNKFFRKRMEIIYDKQKNFINYYKAQREENPELIIDDIVKTYLSNEYSKEIDELNTYIEESLNKITQNSGNDVRNFEEFKNGESFNLYEQELVERWNLAAASAILAISALKEIGGMALAVAMLPGIQPDLFESIEKPSSVTVDFWEMTKLEAIMKYKEYIPEYTSEHFDMLDEEVQSSFESVLASKSDKSEIFSSLGDMEASPLEVKIAFNSKGIINQGLISVKDSYCSNLIVKQIENRYKILNNSLNPAISEDNDFNTTTNTFIDSIMAEANADNGRFMMELGKYLRVGFFPDVKTTINLSGPEAYAAAYQDLLMFKEGSMNIHLIEADLRNFEIFKTNISQSTEQEMASLWSFDDSRAKAQFEEYKRNYFEGSL

SEQ ID NO: 651 - protein, 542 aa, Artificial Sequence; identical to SEQ ID NO: 650
  Synthetic amino acid sequence

SEQ ID NO: 652 - protein, 542 aa, Artificial Sequence; identical to SEQ ID NO: 247
  Synthetic amino acid sequence

SEQ ID NO: 653 - protein, 542 aa, Artificial Sequence; identical to SEQ ID NO: 642
  Synthetic amino acid sequence

SEQ ID NO: 654 - protein, 542 aa, Artificial Sequence
  Synthetic amino acid sequence
SLVNRKQLEKMANVRFRTQEDEYVAILDALEEYHNMSENTVVEKYLKLKDINSLTDIYIDTYKKSGRNKALKKFKEYLVTEVLELKNNNLTPVEKNLHFVWIGGQINDTAINYINQWKDVNSDYNVNVFYDSNAFLINTLKKTIVESAINDTLESFRENLNNPRFDYNKFFRKRMEIIYDKQKNFINYYKAQREENPELIIDDIVKIYLSNEYSKEIDELNTYIEESLNKIKQNSGNDVRNFEEFKNGESFKLYEQELVERWNLAAASAILAISALKEIGGMALAVAMLPGIQPGLFESIEKPSSVTVDFWEMTKLEAIMKYKEYIPGYTSEHFDMLDEEVQSSFESALASKSDKSEIFSSLGDMEASPLEVKIAFNSKGIINQGLISVKDSYCSNLIVKQIENRYKILNNSLNPAISEDNDFNTTTNTFIDSIMAEANADNGRFMMELGKYLRVGFFPDVKTTVNLSGPEAYAAAYQDLLMFKEGSMNIHLIEADLRNFEISKTNISQSTEQEMASLWTFDDARAKVQFEEYKRNYFEGSL

SEQ ID NO: 655 - protein, 542 aa, Artificial Sequence; identical to SEQ ID NO: 654
  Synthetic amino acid sequence

SEQ ID NO: 656 - protein, 542 aa, Artificial Sequence; identical to SEQ ID NO: 622
  Synthetic amino acid sequence

SEQ ID NO: 657 - protein, 542 aa, Artificial Sequence; identical to SEQ ID NO: 654
  Synthetic amino acid sequence

SEQ ID NO: 658 - protein, 542 aa, Artificial Sequence; identical to SEQ ID NO: 622
  Synthetic amino acid sequence

SEQ ID NO: 659 - protein, 542 aa, Artificial Sequence; identical to SEQ ID NO: 622
  Synthetic amino acid sequence

SEQ ID NO: 660 - protein, 542 aa, Artificial Sequence; identical to SEQ ID NO: 622
  Synthetic amino acid sequence

SEQ ID NO: 661 - protein, 542 aa, Artificial Sequence; identical to SEQ ID NO: 654
  Synthetic amino acid sequence

SEQ ID NO: 662 - protein, 542 aa, Artificial Sequence; identical to SEQ ID NO: 622
  Synthetic amino acid sequence

SEQ ID NO: 663 - protein, 542 aa, Artificial Sequence
  Synthetic amino acid sequence
SLVNRKQLEKMANVRFRTQEDEYVAILDALEEYHNMSENTVVEKYLKLKDINSLTDIYIDTYKKSGRNKALKKFKEYLVIEVLELKNNNLTPVEKNLHFVWIGGQINDTAINYINQWKDVNSDYNVNVFYDSNAFLINTLKKTIVESAINDTLESFRENLNNPRFDYNKFFRKRMEIIYDKQKNFINYYKAQREENPELIIDDIVKIYLSNEYSKEIDELNTYIEESLNKIKQNSGNDVRNFEEFKNGESFKLYEQELVERWNLAAASAILAISALKEIGGMALAVAMLPGIQPGLFESIEKPSSVTVDFWEMTKLEAIMKYKEYIPGYTSEHFDMLDEEVQSSFESALASKSDKSEIFSSLGDMEASPLEVKIAFNSKGIINQGLISVKDSYCSNLIVKQIENRYKILNNSLNPAISEDNDFNTTTNTFIDSIMAEANADNGRFMMELGKYLRVGFFPDVKTTVNLSGPEAYAAAYQDLLMFKEGSMNIHLIEADLRNFEISKTNISQSTEQEMASLWTFDDARAKVQFEEYKRNYFEGSL

SEQ ID NO: 664 - protein, 2709 aa, Artificial Sequence
  Synthetic amino acid sequence
SLISKEELIKLAYSIRPRENEYKTILTNLDEYNKLTTNNNENKYLQLKKLNESIDVFMNKYKNSSRNRALSNLKKDILKEVILIKNSNTSPVEKNLHFVWIGGEVSDIALEYIKQWADINAEYNIKLWYDSEAFLVNTLKKAIVESSTTEALQLLEEEIQNPQFDNMKFYKKRMEFIYDRQKRFINYYKSQINKPTVPTIDDIIKSHLVSEYNRDETLLESYRTNSLRKINSNHGIDIRANSLFTEQELLNIYSQELLNRGNLAAASDIVRLLALKNFGGVYLAVAMLPGIHSDLFKTIPRPSSIGLDRWEMIKLEAIMKYKKYINNYTSENFDKLDQQLKDNFKLIIESKSEKSEIFSKLENLNVSDLEIKIAFALGSVINQALISKQGSYLTNLVIEQVKNRYQFLNQHLNPAIESDNNFTDTTKIFHDSLFNSATAENSMFLTKIAPYLQVGFMPEARSTISLSGPGAYASAYYDFINLQENTIEKTLKASDLIEFKFPENNLSQLTEQEINSLWSFDQASAKYQFEKYVRDYTGGSLSEDNGVDFNKNTALDKNYLLNNKIPSNNVEEAGSKNYVHYIIQLQGDDISYEATCNLFSKNPKNSIIIQRNMNESAKSYFLSDDGESILELNKYRIPERLKNKEKVKVTFIGHGKDEFNTSEFARLSVDSLSNEISSFLDTIKLDISPKNVEVNLLGANMFSYDFNVEETYPGKLLLSIMDKITSTLPDVNKDSITIGANQYEVRINSEGRKELLAHSGKWINKEEAIMSDLSSKEYIFFDSIDNKLKAKSKNIPGLASISEDIKTLLLDASVSPDTKFILNNLKLNIESSIGDYIYYEKLEPVKNIIHNSIDDLIDEFNLLENVSDELYELKKLNNLDEKYLISFEDISKNNSTYSVRFINKSNGESVYVETEKEIFSKYSEHITKEISTIKNSIITDVNGNLLDNIQLDHTSQVNTLNAAFFIQSLIDYSSNKDVLNDLSTSVKVQLYAQLFSTGLNTIYDSIQLVNLISNAVNDTINVLPTITEGIPIVSTILDGINLGAAIKELLDEHDPLLKKELEAKVGVLAINMSLSIAATVASIVGIGAEVTIFLLPIAGISAGIPSLVNNELILHDKATSVVNYFNHLSESKEYGPLKTEDDKILVPIDDLVISEIDFNNNSIKLGTCNILAMEGGSGHTVTGNIDHFFSSPYISSHIPSLSVYSAIGIKTENLDFSKKIMMLPNAPSRVFWWETGAVPGLRSLENNGTKLLDSIRDLYPGKFYWRFYAFFDYAITTLKPVYEDTNTKIKLDKDTRNFIMPTITTDEIRNKLSYSFDGAGGTYSLLLSSYPISMNINLSKDDLWIFNIDNEVREISIENGTIKKGNLIEDVLSKIDINKNKLIIGNQTIDFSGDIDNKDRYIFLTCELDDKISLIIEINLVAKSYSLLLSGDKNYLISNLSNTIEKINTLGLDSKNIAYNYTDESNNKYFGAISKTSQKSIIHYKKDSKNILEFYNGSTLEFNSKDFIAEDINVFMKDDINTITGKYYVDNNTDKSIDFSISLVSKNQVKVNGLYLNESVYSSYLDFVKNSDGHHNTSNFMNLFLNNISFWKLFGFENINFVIDKYFTLVGKTNLGYVEFICDNNKNIDIYFGEWKTSSSKSTIFSGNGRNVVVEPIYNPDTGEDISTSLDFSYEPLYGIDRYINKVLIAPDLYTSLININTNYYSNEYYPEIIVLNPNTFHKKVNINLDSSSFEYKWSTEGSDFILVRYLEESNKKILQKIRIKGILSNTQSFNKMSIDFKDIKKLSLGYIMSNFKSFNSENELDRDHLGFKIIDNKTYYYDEDSKLVKGLININNSLFYFDPIESNLVTGWQTINGKKYYFDINTGAASTSYKIINGKHFYFNNNGVMQLGVFKGPDGFEYFAPANTQNNNIEGQAIVYQSKFLTLNGKKYYFDNDSKAVTGWRIINNEKYYFNPNNAIAAVGLQVIDNNKYYFNPDTAIISKGWQTVNGSRYYFDTDTAIAFNGYKTIDGKHFYFDSDCVVKIGVFSGSNGFEYFAPANTYNNNIEGQAIVYQSKFLTLNGKKYYFDNNSKAVTGWQTIDSKKYYFNTNTAEAATGWQTIDGKKYYFNTNTAEAATGWQTIDGKKYYFNTNTSIASTGYTIINGKYFYFNTDGIMQIGVFKVPNGFEYFAPANTHNNNIEGQAILYQNKFLTLNGKKYYFGSDSKAITGWQTIDGKKYYFNPNNAIAATHLCTINNDKYYFSYDGILQNGYITIERNNFYFDANNESKMVTGVFKGPNGFEYFAPANTHNNNIEGQAIVYQNKFLTLNGKKYYFDNDSKAVTGWQTIDSKKYYFNLNTAVAVTGWQTIDGEKYYFNLNTAEAATGWQTIDGKRYYFNTNTYIASTGYTIINGKHFYFNTDGIMQIGVFKGPDGFEYFAPANTHNNNIEGQAILYQNKFLTLNGKKYYFGSDSKAVTGLRTIDGKKYYFNTNTAVAVTGWQTINGKKYYFNTNTYIASTGYTIISGKHFYFNTDGIMQIGVFKGPDGFEYFAPANTDANNIEGQAIRYQNRFLYLHDNIYYFGNDSKAATGWATIDGNRYYFEPNTAMGANGYKTIDNKNFYFRNGLPQIGVFKGPNGFEYFAPANTDANNIDGQAIRYQNRFLHLLGKIYYFGNNSKAVTGWQTINSKVYYFMPDTAMAAAGGLFEIDGVIYFFGVDGVKAPGIYG

SEQ ID NO: 665 - protein, 2709 aa, Artificial Sequence
  Synthetic amino acid sequence
SLISKEELIKLAYSIRPRENEYKTILTNLDEYNKLTTNNNENKYLQLKKLNESIDVFMNKYKTSSRNRALSNLKKDILKEVILIKNSNTSPVEKNLHFVWIGGEVSDIALEYIKQWADINAEYNIKLWYDSEAFLVNTLKKAIVESSTTEALQLLEEEIQNPQFDNMKFYKKRMEFIYDRQKRFINYYKSQINKPTVPTIDDIIKSHLVSEYNRDETVLESYRTNSLRKINSNHGIDIRANSLFTEQELLNIYSQELLNRGNLAAASDIVRLLALKNFGGVYLAVAMLPGIHSDLFKTISRPSSIGLDRWEMIKLEAIMKYKKYINNYTSENFDKLDQQLKDNFKLIIESKSEKSEIFSKLENLNVSDLEIKIAFALGSVINQALISKQGSYLTNLVIEQVKNRYQFLNQHLNPAIESDNNFTDTTKIFHDSLFNSATAENSMFLTKIAPYLQVGFMPEARSTISLSGPGAYASAYYDFINLQENTIEKTLKASDLIEFKFPENNLSQLTEQEINSLWSFDQASAKYQFEKYVRDYTGGSLSEDNGVDFNKNTALDKNYLLNNKIPSNNVEEAGSKNYVHYIIQLQGDDISYEATCNLFSKNPKNSIIIQRNMNESAKSYFLSDDGESILELNKYRIPERLKNKEKVKVTFIGHGKDEFNTSEFARLSVDSLSNEISSFLDTIKLDISPKNVEVNLLGANMFSYDFNVEETYPGKLLLSIMDKITSTLPDVNKNSITIGANQYEVRINSEGRKELLAHSGKWINKEEAIMSDLSSKEYIFFDSIDNKLKAKSKNIPGLASISEDIKTLLLDASVSPDTKFILNNLKLNIESSIGDYIYYEKLEPVKNIIHNSIDDLIDEFNLLENVSDELYELKKLNNLDEKYLISFEDISKNNSTYSVRFINKSNGESVYVETEKEIFSKYSEHITKEISTIKNSIITDVNGNLLDNIQLDHTSQVNTLNAAFFIQSLIDYSSNKDVLNDLSTSVKVQLYAQLFSTGLNTIYDSIQLVNLISNAVNDTINVLPTITEGIPIVSTILDGINLGAAIKELLDEHDPLLKKELEAKVGVLAINMSLSIAATVASIVGIGAEVTIFLLPIAGISAGIPSLVNNELILHDKATSVVNYFNHLSESKKYGPLKTEDDKILVPIDDLVISEIDFNNNSIKLGTCNILAMEGGSGHTVTGNIDHFFSSPSISSHIPSLSIYSAIGIETENLDFSKKIMMLPNAPSRVFWWETGAVPGLRSLENDGTRLLDSIRDLYPGKFYWRFYAFFDYAITTLKPVYEDTNIKIKLDKDTRNFIMPTITTNEIRNKLSYSFDGAGGTYSLLLSSYPISTNINLSKDDLWIFNIDNEVREISIENGTIKKGKLIKDVLSKIDINKNKLIIGNQTIDFSGDIDNKDRYIFLTCELDDKISLIIEINLVAKSYSLLLSGDKNYLISNLSNTIEKINTLGLDSKNIAYNYTDESNNKYFGAISKTSQKSIIHYKKDSKNILEFYNDSTLEFNSKDFIAEDINVFMKDDINTITGKYYVDNNTDKSIDFSISLVSKNQVKVNGLYLNESVYSSYLDFVKNSDGHHNTSNFMNLFLDNISFWKLFGFENINFVIDKYFTLVGKTNLGYVEFICDNNKNIDIYFGEWKTSSSKSTIFSGNGRNVVVEPIYNPDTGEDISTSLDFSYEPLYGIDRYINKVLIAPDLYTSLININTNYYSNEYYPEIIVLNPNTFHKKVNINLDSSSFEYKWSTEGSDFILVRYLEESNKKILQKIRIKGILSNTQSFNKMSIDFKDIKKLSLGYIMSNFKSFNSENELDRDHLGFKIIDNKTYYYDEDSKLVKGLININNSLFYFDPIEFNLVTGWQTINGKKYYFDINTGAALTSYKIINGKHFYFNNDGVMQLGVFKGPDGFEYFAPANTQNNNIEGQAIVYQSKFLTLNGKKYYFDNDSKAVTGWRIINNEKYYFNPNNAIAAVGLQVIDNNKYYFNPDTAIISKGWQTVNGSRYYFDTDTAIAFNGYKTIDGKHFYFDSDCVVKIGVFSTSNGFEYFAPANTYNNNIEGQAIVYQSKFLTLNGKKYYFDNNSKAVTGWQTIDSKKYYFNTNTAEAATGWQTIDGKKYYFNTNTAEAATGWQTIDGKKYYFNTNTAIASTGYTIINGKHFYFNTDGIMQIGVFKGPNGFEYFAPANTDANNIEGQAILYQNEFLTLNGKKYYFGSDSKAVTGWRIINNKKYYFNPNNAIAAIHLCTINNDKYYFSYDGILQNGYITIERNNFYFDANNESKMVTGVFKGPNGFEYFAPANTHNNNIEGQAIVYQNKFLTLNGKKYYFDNDSKAVTGWQTIDGKKYYFNLNTAEAATGWQTIDGKKYYFNLNTAEAATGWQTIDGKKYYFNTNTFIASTGYTSINGKHFYFNTDGIMQIGVFKGPNGFEYFAPANTHNNNIEGQAILYQNKFLTLNGKKYYFGSDSKAVTGLRTIDGKKYYFNTNTAVAVTGWQTINGKKYYFNTNTSIASTGYTIISGKHFYFNTDGIMQIGVFKGPDGFEYFAPANTDANNIEGQAIRYQNRFLYLHDNIYYFGNNSKAATGWVTIDGNRYYFEPNTAMGANGYKTIDNKNFYFRNGLPQIGVFKGSNGFEYFAPANTDANNIEGQAIRYQNRFLHLLGKIYYFGNNSKAVTGWQTINGKVYYFMPDTAMAAAGGLFEIDGVIYFFGVDGVKAPGIYG

SEQ ID NO: 666 - protein, 2709 aa, Artificial Sequence; identical to SEQ ID NO: 664
  Synthetic amino acid sequence

SEQ ID NO: 667 - protein, 2709 aa, Artificial Sequence; identical to SEQ ID NO: 665
  Synthetic amino acid sequence

SEQ ID NO: 668 - protein, 2709 aa, Artificial Sequence; identical to SEQ ID NO: 665
  Synthetic amino acid sequence

SEQ ID NO: 669 - protein, 2709 aa, Artificial Sequence
  Synthetic amino acid sequence
SLISKEELIKLAYSIRPRENEYKTILTNLDEYNKLTTNNNENKYLQLKKLNESIDVFMNKYKTSSRNRALSNLKKDILKEVILIKNSNTSPVEKNLHFVWIGGEVSDIALEYIKQWADINAEYNIKLWYDSEAFLVNTLKKAIVESSTTEALQLLEEEIQNPQFDNMKFYKKRMEFIYDRQKRFINYYKSQINKPTVPTIDDIIKSHLVSEYNRDETVLESYRTNSLRKINSNHGIDIRANSLFTEQELLNIYSQELLNRGNLAAASDIVRLLALKNFGGVYLAVAMLPGIHSDLFKTISRPSSIGLDRWEMIKLEAIMKYKKYINNYTSENFDKLDQQLKDNFKLIIESKSEKSEIFSKLENLNVSDLEIKIAFALGSVINQALISKQGSYLTNLVIEQVKNRYQFLNQHLNPAIESDNNFTDTTKIFHDSLFNSATAENSMFLTKIAPYLQVGFMPEARSTISLSGPGAYASAYYDFINLQENTIEKTLKASDLIEFKFPENNLSQLTEQEINSLWSFDQASAKYQFEKYVRDYTGGSLSEDNGVDFNKNTALDKNYLLNNKIPSNNVEEAGSKNYVHYIIQLQGDDISYEATCNLFSKNPKNSIIIQRNMNESAKSYFLSDDGESILELNKYRIPERLKNKEKVKVTFIGHGKDEFNTSEFARLSVDSLSNEISSFLDTIKLDISPKNVEVNLLGANMFSYDFNVEETYPGKLLLSIMDKITSTLPDVNKNSITIGANQYEVRINSEGRKELLAHSGKWINKEEAIMSDLSSKEYIFFDSIDNKLKAKSKNIPGLASISEDIKTLLLDASVSPDTKFILNNLKLNIESSIGDYIYYEKLEPVKNIIHNSIDDLIDEFNLLENVSDELYELKKLNNLDEKYLISFEDISKNNSTYSVRFINKSNGESVYVETEKEIFSKYSEHITKEISTIKNSIITDVNGNLLDNIQLDHTSQVNTLNAAFFIQSLIDYSSNKDVLNDLSTSVKVQLYAQLFSTGLNTIYDSIQLVNLISNAVNDTINVLPTITEGIPIVSTILDGINLGAAIKELLDEHDPLLKKELEAKVGVLAINMSLSIAATVASIVGIGAEVTIFLLPIAGISAGIPSLVNNELILHDKATSVVNYFNHLSESKKYGPLKTEDDKILVPIDDLVISEIDFNNNSIKLGTCNILAMEGGSGHTVTGNIDHFFSSPSISSHIPSLSIYSAIGIETENLDFSKKIMMLPNAPSRVFWWETGAVPGLRSLENDGTRLLDSIRDLYPGKFYWRFYAFFDYAITTLKPVYEDTNIKIKLDKDTRNFIMPTITTNEIRNKLSYSFDGAGGTYSLLLSSYPISTNINLSKDDLWIFNIDNEVREISIENGTIKKGKLIKDVLSKIDINKNKLIIGNQTIDFSGDIDNKDRYIFLTCELDDKISLIIEINLVAKSYSLLLSGDKNYLISNLSNTIEKINTLGLDSKNIAYNYTDESNNKYFGAISKTSQKSIIHYKKDSKNILEFYNDSTLEFNSKDFIAEDINVFMKDDVNTITGKYYVDNNTDKSIDFSISLVSKNQVKVNGLYLNESVYSSYLDFVKNSDGHHNTSNFMNLFLDNISFWKLFGFENINFVIDKYFTLVGKTNLGYVEFICDNNKNIDIYFGEWKTSSSKSTIFSGNGRNVVVEPIYNPDTGEDISTSLDFSYEPLYGIDRYINKVLIAPDLYTSLININTNYYSNEYYPEIIVLNPNTFHKKVNINLDSSSFEYKWSTEGSDFILVRYLEESNKKILQKIRIKGILSNTQSFNKMSIDFKDIKKLSLGYIMSNFKSFNSENELDRDHLGFKIIDNKTYYYDEDSKLVKGLININNSLFYFDPIEFNLVTGWQTINGKKYYFDINTGAALTSYKIINGKHFYFNNDGVMQLGVFKGPDGFEYFAPANTQNNNIEGQAIVYQSKFLTLNGKKYYFDNNSKAVTGWRIINNEKYYFNPNNAIAAVGLQVIDNNKYYFNPDTAIISKGWQTVNGSRYYFDTDTAIAFNGYKTIDGKHFYFDSDCVVKIGVFSTSNGFEYFAPANTYNNNIEGQAIVYQSKFLTLNGKKYYFDNNSKAVTGWQTIDSKKYYFNTNTAEAATGWQTIDGKKYYFNTNTAEAATGWQTIDGKKYYFNTNTAIASTGYTIINGKHFYFNTDGIMQIGVFKGPNGFEYFAPANTDANNIEGQAILYQNEFLTLNGKKYYFGSDSKAVTGWRIINNKKYYFNPNNAIAAIHLCTINNDKYYFSYDGILQNGYITIERNNFYFDANNESKMVTGVFKGPNGFEYFAPANTHNNNIEGQAIVYQNKFLTLNGKKYYFDNDSKAVTGWQTIDGKKYYFNLNTAEAATGWQTIDGKKYYFNLNTAEAATGWQTIDGKKYYFNTNTFIASTGYTSINGKHFYFNTDGIMQIGVFKGPNGFEYFAPANTDANNIEGQAILYQNKFLTLNGKKYYFGSDSKAVTGLRTIDGKKYYFNTNTAVAVTGWQTINGKKYYFNTNTSIASTGYTIISGKHFYFNTDGIMQIGVFKGPDGFEYFAPANTDANNIEGQAIRYQNRFLYLHDNIYYFGNNSKAATGWVTIDGNRYYFEPNTAMGANGYKTIDNKNFYFRNGLPQIGVFKGSNGFEYFAPANTDANNIEGQAIRYQNRFLHLLGKIYYFGNNSKAVTGWQTINGKVYYFMPDTAMAAAGGLFEIDGVIYFFGVDGVKAPGIYG

SEQ ID NO: 670 - protein, 2709 aa, Artificial Sequence
  Synthetic amino acid sequence
SLISKEELIKLAYSIRPRENEYKTILTNLDEYNKLTTNNNENKYLQLKKLNESIDVFMNKYKNSSRNRALSNLKKDILKEVILIKNSNTSPVEKNLHFVWIGGEVSDIALEYIKQWADINAEYNIKLWYDSEAFLVNTLKKAIVESSTTEALQLLEEEIQNPQFDNMKFYKKRMEFIYDRQKRFVNYYKSQINKPTVPTIDDIIKSHLVSEYNRDETLLESYRTNSLRKINSNHGIDIRANSLFTEQELLNIYSQELLNRGNLAAASDIVRLLALKNFGGVYLAVAMLPGIHSDLFKTISRPSSIGLDRWEMIKLEAIMKYKKYINNYTSENFDKLDQQLKDNFKLIIESKSEKSEIFSKLENLNVSDLEIKIAFALGSVINQALISKQGSYLTNLVIEQVKNRYQFLNQHLNPAIESDNNFTDTTKIFHDSLFNSATAENSMFLTKIAPYLQVGFMPEARSTISLSGPGAYASAYYDFINLQENTIEKTLKASDLIEFKFPENNLSQLTEQEINSLWSFDQASAKYQFEKYVRDYTGGSLSEDNEVDFNKNTALDKNYLLNNKIPSNNVEEAGSKNYVHYIIQLQGDDISYEATCNLFSKNPKNSIIIQRNMNESAKSYFLSDDGESILELNKYRIPERLKNKEKVKVTFIGHGKDEFNTSEFARLSVDSLSNEISSFLDTIKLDISPKNVEVNLLGANMFSYDFNVEETYPGKLLLSIMDKITSTLPDVNKDSITIGANQYEVRINSEGRKELLAHSGKWINKEEAIMSDLSSKEYIFFDSIDNKLKAKSKNIPGLASISEDIKTLLLDTSVSPDTKFILNNLKLNIESSVGDYIYYEKLEPVKNIIHNSIDDLIDEFNLLENVSDELYELKKLNNLDEKYLISFEDISKNNSTYSVRFINKSNGESVYVETEKEIFSKYSEHITKEISTIKNSIITDVNGNLLDNIQLDHTSQVNTLNAAFFIQSLIDYSSNKDLLNDLSTSVKVQLYAQLFSTGLNTIYDSIQLVNLISNAVNDTINVLPTITEGIPIVSTILDGINLGAAIKELLDEHDPLLKKELEAKVGVLAINMSLSIAATVASIVGIGAEVTIFLLPIAGISAGIPSLVNNELILHDKATSVVNYFNHLSESKEYGPLKTEDDKILVPIDDLVISEIDFNNNAIKLGTCNILAMEGGSGHTVTGNIDHFFSSPSISSHIPSLSIYSAIGIKTENLDFSKKIMMLPNAPSRVFWWETGAVPGLRSLENNGTKLLDSIRDLYPGKFYWRFYAFFDYAITTLKPVYEDTNIKIKLDKDTRNFIMPTITTNEIRNKLSYSFDGAGGTYSLLLSSYPISTNINLSKDDLWIFNIDNEVREISIENGTIKKGKLIKDVLSKIDINKNKLIIGNQTIDFSGDIDNKDRYIFLTCELDDKISLIIEINLVAKSYSLLLSGDKNYLISNLSNTIEKINTLGLDSKNIAYNYTDESNNKYFGAISKTSQKSIIHYKKDSKNILEFYNGSTLEFNSKDFIAEDINVFMKDDINTITGKYYVDNNTDKSIDFSISLVSKNQAKVNGLYLNESVYSSYLDFVKNADGHHNTSNFMNLFLDNISFWKLFGFENINFVVDKYFTLVGKTNLGYVEFICDNNKNIDIYFGEWKTSSSKSTIFSGNGRNVVVEPIYNPDTGEDISTSLDFSYEPLYGIDRYINKVLIAPDLYTSLININTNYYSNEYYPEIIVLNPNTFHKKVNINLDSSSFEYKWSTEGSDFILVRYLEESNKKILQKIRIKGILSNTQSFNKMSIDFKDIKKLSLVYIMSNFKSFNSENELDRDHLGFKIIDNKTYYYDEASKLVKGLININNSLFYFDPIESNLVTGWQTINGKKYYFDINTGAALTSYKIINGKHFYFNNNGVMQLGVFKGPDRFEYFAPANTQNNNIEGQAIVYQSKFLTLNGKKYYFDNDSKAVTGWRIINNEKYYFNPNNAIAAVGLQVIDNNKYYFNPDTAIISKGWQTVNGSRYYFDTDTAIAFNGYKTIDGKHFYFDSDCVVKIGVFSGSNGFEYFAPANTYNNNIEGQAIVYQSKFLTLNGKKYYFDNNSKAVTGWQTIDSKKYYFNTNTAEAATGWQTIDGKKYYFNTNTAEVATGWQTIDGKKYYFNTNTSIASTGYTIINGKHFYFNTDGIMQIGVFKGPDGFEYFAPANTDANNIEGQAILYQNKFLTLNGKKYYFASDSKAVTGWRIINNKKYYFNPNNAIAATHLYTINNDKYYFSYDGILQNGYITIERNNFYFDANNESKMVTGVFKGPNGFEYFAPANTHNNNIEGQAIVYQNKFLTLNGKKYYFDNDSKAVTGWQTIDGKKYYFNLNTAVAVTGWQTIDGKKYYFNTNTAETATGWQTIDGKKYYFNTNTSIASTGYTIINGKHFYFNTDGIMQIGVFKGPDGFEYFAPANTDANNIEGQAILYQNKFLTLNGKKYYFASDSKAVTGLRTIDGKKYYFNTNTAEAATGWQTIDGKKYYFNTNTSIASTGYTIINDKHFYFNTDGIMQIGVFKGPDGFEYFAPANTDANNIEGQAIRYQNRFLYLHDNIYYFGNNSKAATGWVTIDGRRYYFEPNTAIGANGYKIIDNKNFYFRNGLPQIGVFKGPNGFEYFAPANTDANNIDGQAIRYQNRFLHLLGNIYYFGNNSKAVTGWQTINGNMYYFMPDTAMAAAGGLFEIDGVIYFFGVDGVKAPGIYG

SEQ ID NO: 671 - protein, 2709 aa, Artificial Sequence; identical to SEQ ID NO: 669
  Synthetic amino acid sequence

SEQ ID NO: 672 - protein, 2709 aa, Artificial Sequence
  Synthetic amino acid sequence
SLISKEELIKLAYSIRPRENEYKTILTNLDEYNKLTTNNNENKYLQLKKLNESIDVFMNKYKNSSRNRALSNLKKDILKEVILIKNSNTSPVEKNLHFVWIGGEVSDIALEYIKQWADINAEYNIKLWYDSEAFLVNTLKKAIVESSTTEALQLLEEEIQNPQFDNMKFYKKRMEFIYDRQKRFVNYYKSQINKPTVPTIDDIIKSHLVSEYNRDETLLESYRTNSLRKINSNHGIDIRANSLFTEQELLNIYSQELLNRGNLAAASDIVRLLALKNFGGVYLAVAMLPGIHSDLFKTISRPSSIGLDRWEMIKLEAIMKYKKYINNYTSENFDKLDQQLKDNFKLIIESKSEKSEIFSKLENLNVSDLEIKIAFALGSVINQALISKQGSYLTNLVIEQVKNRYQFLNQHLNPAIESDNNFTDTTKIFHDSLFNSATAENSMFLTKIAPYLQVGFMPEARSTISLSGPGAYASAYYDFINLQENTIEKTLKASDLIEFKFPENNLSQLTEQEINSLWSFDQASAKYQFEKYVRDYTGGSLSEDNEVDFNKNTALDKNYLLNNKIPSNNVEEAGSKNYVHYIIQLQGDDISYEATCNLFSKNPKNSIIIQRNMNESAKSYFLSDDGESILELNKYRIPERLKNKEKVKVTFIGHGKDEFNTSEFARLSVDSLSNEISSFLDTIKLDISPKNVEVNLLGANMFSYDFNVEETYPGKLLLSIMDKITSTLPDVNKDSITIGANQYEVRINSEGRKELLAHSGKWINKEEAIMSDLSSKEYIFFDSIDNKLKAKSKNIPGLASISEDIKTLLLDTSVSPDTKFILNNLKLNIESSVGDYIYYEKLEPVKNIIHNSIDDLIDEFNLLENVSDELYELKKLNNLDEKYLISFEDISKNNSTYSVRFINKSNGESVYVETEKEIFSKYSEHITKEISTIKNSIITDVNGNLLDNIQLDHTSQVNTLNAAFFIQSLIDYSSNKDLLNDLSTSVKVQLYAQLFSTGLNTIYDSIQLVNLISNAVNDTINVLPTITEGIPIVSTILDGINLGAAIKELLDEHDPLLKKELEAKVGVLAINMSLSIAATVASIVGIGAEVTIFLLPIAGISAGIPSLVNNELILHDKATSVVNYFNHLSESKEYGPLKTEDDKILVPIDDLVISEIDFNNNAIKLGTCNILAMEGGSGHTVTGNIDHFFSSPSISSHIPSLSIYSAIGIKTENLDFSKKIMMLPNAPSRVFWWETGAVPGLRSLENNGTKLLDSIRDLYPGKFYWRFYAFFDYAITTLKPVYEDTNIKIKLDKDTRNFIMPTITTNEIRNKLSYSFDGAGGTYSLLLSSYPISTNINLSKDDLWIFNIDNEVREISIENGTIKKGKLIKDVLSKIDINKNKLIIGNQTIDFSGDIDNKDRYIFLTCELDDKISLIIEINLVAKSYSLLLSGDKNYLISNLSNTIEKINTLGLDSKNIAYNYTDESNNKYFGAISKTSQKSIIHYKKDSKNILEFYNGSTLEFNSKDFIAEDINVFMKDDINTITGKYYVDNNTDKSIDFSISLVSKNQAKVNGLYLNESVYSSYLDFVKNADGHHNTSNFMNLFLDNISFWKLFGFENINFVVDKYFTLVGKTNLGYVEFICDNNKNIDIYFGEWKTSSSKSTIFSGNGRNVVVEPIYNPDTGEDISTSLDFSYEPLYGIDRYINKVLIAPDLYTSLININTNYYSNEYYPEIIVLNPNTFHKKVNINLDSSSFEYKWSTEGSDFILVRYLEESNKKILQKIRIKGILSNTQSFNKMSIDFKDIKKLSLVYIMSNFKSFNSENELDRDHLGFKIIDNKTYYYDEASKLVKGLININNSLFYFDPIESNLVTGWQTINGKKYYFDINTGAALTSYKIINGKHFYFNNNGVMQLGVFKGPDRFEYFAPANTQNNNIEGQAIVYQSKFLTLNGKKYYFDNDSKAVTGWRIINNEKYYFNPNNAIAAVGLQVIDNNKYYFNPDTAIISKGWQTVNGSRYYFDTDTAIAFNGYKTIDGKHFYFDSDCVVKIGVFSGSNGFEYFAPANTYNNNIEGQAIVYQSKFLTLNGKKYYFDNNSKAVTGWQTIDSKKYYFNTNTAEAATGWQTIDGKKYYFNTNTAEVATGWQTIDGKKYYFNTNTSIASTGYTIINGKHFYFNTDGIMQIGVFKGPDGFEYFAPANTDANNIEGQAILYQNKFLTLNGKKYYFASDSKAVTGWRIINNKKYYFNPNNAIAATHLYTINNDKYYFSYDGILQNGYITIERNNFYFDANNESKMVTGVFKGPNGFEYFAPANTHNNNIEGQAIVYQNKFLTLNGKKYYFDNDSKAVTGWQTIDGKKYYFNLNTAVAVTGWQTIDGKKYYFNTNTAEAATGWQTIDGKKYYFNTNTSIASTGYTIINGKHFYFNTDGIMQIGVFKGPDGFEYFAPANTDANNIEGQAILYQNKFLTLNGKKYYFASDSKAVTGLRTIDGKKYYFNTNTAEAATGWQTIDGKKYYFNTNTSIASTGYTIINDKHFYFNTDGIMQIGVFKGPDGFEYFAPANTDANNIEGQAIRYQNRFLYLHDNIYYFGNNSKAATGWVTIDGRRYYFEPNTAIGANGYKIIDNKNFYFRNGLPQIGVFKGPNGFEYFAPANTDANNIDGQAIRYQNRFLHLLGNIYYFGNNSKAVTGWQTINGNMYYFMPDTAMAAAGGLFEIDGVIYFFGVDGVKAPGIYG

SEQ ID NO: 673 - protein, 2709 aa, Artificial Sequence; identical to SEQ ID NO: 664
  Synthetic amino acid sequence

SEQ ID NO: 674 - protein, 2709 aa, Artificial Sequence
  Synthetic amino acid sequence
SLISKEELIKLAYSIRPRENEYKTILTNLDEYNKLTTNNNENKYLQLKKLNESIDVFMNKYKTSSRNRALSNLKKDILKEVILIKNSNTSPVEKNLHFVWIGGEVSDIALEYIKQWADINAEYNIKLWYDSEAFLVNTLKKAIVESSTTEALQLLEEEIQNPQFDNMKFYKKRMEFIYDRQKRFINYYKSQINKPTVPTIDDIIKSHLVSEYNRDETVLESYRTNSLRKINSNHGIDIRANSLFTEQELLNIYSQELLNRGNLAAASDIVRLLALKNFGGVYLAVAMLPGIHSDLFKTISRPSSIGLDRWEMIKLEAIMKYKKYINNYTSENFDKLDQQLKDNFKLIIESKSEKSEIFSKLENLNVSDLEIKIAFALGSVINQALISKQGSYLTNLVIEQVKNRYQFLNQHLNPAIESDNNFTDTTKIFHDSLFNSATAENSMFLTKIAPYLQVGFMPEARSTISLSGPGAYASAYYDFINLQENTIEKTLKASDLIEFKFPENNLSQLTEQEINSLWSFDQASAKYQFEKYVRDYTGGSLSEDNGVDFNKNTALDKNYLLNNKIPSNNVEEAGSKNYVHYIIQLQGDDISYEATCNLFSKNPKNSIIIQRNMNESAKSYFLSDDGESILELNKYRIPERLKNKEKVKVTFIGHGKDEFNTSEFARLSVDSLSNEISSFLDTIKLDISPKNVEVNLLGANMFSYDFNVEETYPGKLLLSIMDKITSTLPDVNKNSITIGANQYEVRINSEGRKELLAHSGKWINKEEAIMSDLSSKEYIFFDSIDNKLKAKSKNIPGLASISEDIKTLLLDASVSPDTKFILNNLKLNIESSIGDYIYYEKLEPVKNIIHNSIDDLIDEFNLLENVSDELYELKKLNNLDEKYLISFEDISKNNSTYSVRFINKSNGESVYVETEKEIFSKYSEHITKEISTIKNSIITDVNGNLLDNIQLDHTSQVNTLNAAFFIQSLIDYSSNKDVLNDLSTSVKVQLYAQLFSTGLNTIYDSIQLVNLISNAVNDTINVLPTITEGIPIVSTILDGINLGAAIKELLDEHDPLLKKELEAKVGVLAINMSLSIAATVASIVGIGAEVTIFLLPIAGISAGIPSLVNNELILHDKATSVVNYFNHLSESKKYGPLKTEDDKILVPIDDLVISEIDFNNNSIKLGTCNILAMEGGSGHTVTGNIDHFFSSPSISSHIPSLSIYSAIGIETENLDFSKKIMMLPNAPSRVFWWETGAVPGLRSLENNGTKLLDSIRDLYPGKFYWRFYAFFDYAITTLKPVYEDTNIKIKLDKDTRNFIMPTITTNEIRNKLSYSFDGAGGTYSLLLSSYPISTNINLSKDDLWIFNIDNEVREISIENGTIKKGKLIKDVLSKIDINKNKLIIGNQTIDFSGDIDNKDRYIFLTCELDDKISLIIEINLVAKSYSLLLSGDKNYLISNLSNTIEKINTLGLDSKNIAYNYTDESNNKYFGAISKTSQKSIIHYKKDSKNILEFYNGSTLEFNSKDFIAEDINVFMKDDINTITGKYYVDNNTDKSIDFSISLVSKNQVKVNGLYLNESVYSSYLDFVKNSDGHHNTSNFMNLFLDNISFWKLFGFENINFVIDKYFTLVGKTNLGYVEFICDNNKNIDIYFGEWKTSSSKSTIFSGNGRNVVVEPIYNPDTGEDISTSLDFSYEPLYGIDRYINKVLIAPDLYTSLININTNYYSNEYYPEIIVLNPNTFHKKVNINLDSSSFEYKWSTEGSDFILVRYLEESNKKILQKIRIKGILSNTQSFNKMSIDFKDIKKLSLGYIMSNFKSFNSENELDRDHLGFKIIDNKTYYYDEDSKLVKGLININNSLFYFDPIEFNLVTGWQTINGKKYYFDINTGAALTSYKIINGKHFYFNNDGVMQLGVFKGPDGFEYFAPANTQNNNIEGQAIVYQSKFLTLNGKKYYFDNDSKAVTGWRIINNEKYYFNPNNAIAAVGLQVIDNNKYYFNPDTAIISKGWQTVNGSRYYFDTDTAIAFNGYKTIDGKHFYFDSDCVVKIGVFSTSNGFEYFAPANTYNNNIEGQAIVYQSKFLTLNGKKYYFDDNSKAVTGWQTIDSKKYYFNTNTAEAATGWQTIDGKKYYFNTNTAEAATGWQTIDGKKYYFNTNTAIASTGYTIINGKHFYFNTDGIMQIGVFKGPNGFEYFAPANTDANNIEGQAILYQNEFLTLNGKKYYFGSDSKAVTGWRIINNKKYYFNPNNAIAAIHLCTINNDKYYFSYDGILQNGYITIERNNFYFDANNESKMVTGVFKGPNGFEYFAPANTYNNNIEGQAIVYQNKFLTLNGKKYYFDNDSKAVTGWQTIDGKKYYFNLNTAEAATGWQTIDGKKYYFNLNTAEAATGWQTIDGKKYYFNTNTFIASTGYTSINGKHFYFNTDGIMQIGVFKGPNGFEYFAPANTHNNNIEGQAILYQNKFLTLNGKKYYFGSDSKAVTGLRTIDGKKYYFNTNTAVAVTGWQTINGKKYYFNTNTSIASTGYTIISGKHFYFNTDGIMQIGVFKGPDGFEYFAPANTDANNIEGQAIRYQNRFLYLHDNIYYFGNNSKAATGWVTIDGNRYYFEPNTAMGANGYKTIDNKNFYFRNGLPQIGVFKGSNGFEYFAPANTDANNIEGQAIRYQNRFLHLLGKIYYFGNNSKAVTGWQTINGKVYYFMPDTAMAAAGGLFEIDGVIYFFGVDGVKAPGIYG

SEQ ID NO: 675 - protein, 2709 aa, Artificial Sequence
  Synthetic amino acid sequence
SLISKEELIKLAYSIRPRENEYKTILTNLDEYNKLTTNNNENKYLQLKKLNESIDVFMNKYKTSSRNRALSNLKKDILKEVILIKNSNTSPVEKNLHFVWIGGEVSDIALEYIKQWADINAEYNIKLWYDSEAFLVNTLKKAIVESSTTEALQLLEEEIQNPQFDNMKFYKKRMEFIYDRQKRFINYYKSQINKPTVPTIDDIIKSHLVSEYNRDETVLESYRTNSLRKINSNHGIDIRANSLFTEQELLNIYSQELLNRGNLAAASDIVRLLALKNFGGVYLAVAMLPGIHSDLFKTISRPSSIGLDRWEMIKLEAIMKYKKYINNYTSENFDKLDQQLKDNFKLIIESKSEKSEIFSKLENLNVSDLEIKIAFALGSVINQALISKQGSYLTNLVIEQVKNRYQFLNQHLNPAIESDNNFTDTTKIFHDSLFNSATAENSMFLTKIAPYLQVGFMPEARSTISLSGPGAYASAYYDFINLQENTIEKTLKASDLIEFKFPENNLSQLTEQEINSLWSFDQASAKYQFEKYVRDYTGGSLSEDNGVDFNKNTALDKNYLLNNKIPSNNVEEAGSKNYVHYIIQLQGDDISYEATCNLFSKNPKNSIIIQRNMNESAKSYFLSDDGESILELNKYRIPERLKNKEKVKVTFIGHGKDEFNTSEFARLSVDSLSNEISSFLDTIKLDISPKNVEVNLLGANMFSYDFNVEETYPGKLLLSIMDKITSTLPDVNKNSITIGANQYEVRINSEGRKELLAHSGKWINKEEAIMSDLSSKEYIFFDSIDNKLKAKSKNIPGLASISEDIKTLLLDASVSPDTKFILNNLKLNIESSIGDYIYYEKLEPVKNIIHNSIDDLIDEFNLLENVSDELYELKKLNNLDEKYLISFEDISKNNSTYSVRFINKSNGESVYVETEKEIFSKYSEHITKEISTIKNSIITDVNGNLLDNIQLDHTSQVNTLNAAFFIQSLIDYSSNKDVLNDLSTSVKVQLYAQLFSTGLNTIYDSIQLVNLISNAVNDTINVLPTITEGIPIVSTILDGINLGAAIKELLDEHDPLLKKELEAKVGVLAINMSLSIAATVASIVGIGAEVTIFLLPIAGISAGIPSLVNNELILHDKATSVVNYFNHLSESKKYGPLKTEDDKILVPIDDLVISEIDFNNNSIKLGTCNILAMEGGSGHTVTGNIDHFFSSPSISSHIPSLSIYSAIGIETENLDFSKKIMMLPNAPSRVFWWETGAVPGLRSLENDGTRLLDSIRDLYPGKFYWRFYAFFDYAITTLKPVYEDTNIKIKLDKDTRNFIMPTITTNEIRNKLSYSFDGAGGTYSLLLSSYPISTNINLSKDDLWIFNIDNEVREISIENGTIKKGKLIKDVLSKIDINKNKLIIGNQTIDFSGDIDNKDRYIFLTCELDDKISLIIEINLVAKSYSLLLSGDKNYLISNLSNTIEKINTLGLDSKNIAYNYTDESNNKYFGAISKTSQKSIIHYKKDSKNILEFYNDSTLEFNSKDFIAEDINVFMKDDINTITGKYYVDNNTDKSIDFSISLVSKNQVKVNGLYLNESVYSSYLDFVKNSDGHHNTSNFMNLFLDNISFWKLFGFENINFVIDKYFTLVGKTNLGYVEFICDNNKNIDIYFGEWKTSSSKSTIFSGNGRNVVVEPIYNPDTGEDISTSLDFSYEPLYGIDRYINKVLIAPDLYTSLININTNYYSNEYYPEIIVLNPNTFHKKVNINLDSSSFEYKWSTEGSDFILVRYLEESNKKILQKIRIKGILSNTQSFNKMSIDFKDIKKLSLGYIMSNFKSFNSENELDRDHLGFKIIDNKTYYYDEDSKLVKGLININNSLFYFDPIEFNLVTGWQTINGKKYYFDINTGAALTSYKIINGKHFYFNNDGVMQLGVFKGPDGFEYFAPANTQNNNIEGQAIVYQSKFLTLNGKKYYFDNNSKAVTGWRIINNEKYYFNPNNAIAAVGLQVIDNNKYYFNPDTAIISKGWQTVNGSRYYFDTDTAIAFNGYKTIDGKHFYFDSDCVVKIGVFSTSNGFEYFAPANTYNNNIEGQAIVYQSKFLTLNGKKYYFDNNSKAVTGWQTIDSKKYYFNTNTAEAATGWQTIDGKKYYFNTNTAEAATGWQTIDGKKYYFNTNTAIASTGYTIINGKHFYFNTDGIMQIGVFKGPNGFEYFAPANTDANNIEGQAILYQNEFLTLNGKKYYFGSDSKAVTGWRIINNKKYYFNPNNAIAAIHLCTINNDKYYFSYDGILQNGYITIERNNFYFDANNESKMVTGVFKGPNGFEYFAPANTHNNNIEGQAIVYQNKFLTLNGKKYYFDNDSKAVTGWQTIDGKKYYFNLNTAEAATGWQTIDGKKYYFNLNTAEAATGWQTIDGKKYYFNTNTFIASTGYTSINGKHFYFNTDGIMQIGVFKGPNGFEYFAPANTHNNNIEGQAILYQNKFLTLNGKKYYFGSDSKAVTGLRTIDGKKYYFNTNTAVAVTGWQTINGKKYYFNTNTSIASTGYTIISGKHFYFNTDGIMQIGVFKGPDGFEYFAPANTDANNIEGQAIRYQNRFLYLHDNIYYFGNNSKAATGWVTIDGNRYYFEPNTAMGANGYKTIDNKNFYFRNGLPQIGVFKGSNGFEYFAPANTDANNIEGQAIRYQNRFLHLLGKIYYFGNNSKAVTGWQTINGKVYYFMPDTAMAAAGGLFEIDGVIYFFGVDGVKAPGIYG

SEQ ID NO: 676 - protein, 2709 aa, Artificial Sequence; identical to SEQ ID NO: 672
  Synthetic amino acid sequence

SEQ ID NO: 677 - protein, 2709 aa, Artificial Sequence
  Synthetic amino acid sequence
SLISKEELIKLAYSIRPRENEYKTILTNLDEYNKLTTNNNENKYLQLKKLNESIDVFMNKYKTSSRNRALSNLKKDILKEVILIKNSNTSPVEKNLHFVWIGGEVSDIALEYIKQWADINAEYNIKLWYDSEAFLVNTLKKAIVESSTTEALQLLEEEIQNPQFDNMKFYKKRMEFIYDRQKRFINYYKSQINKPTVPTIDDIIKSHLVSEYNRDETVLESYRTNSLRKINSNHGIDIRANSLFTEQELLNIYSQELLNRGNLAAASDIVRLLALKNFGGVYLAVAMLPGIHSDLFKTISRPSSIGLDRWEMIKLEAIMKYKKYINNYTSENFDKLDQQLKDNFKLIIESKSEKSEIFSKLENLNVSDLEIKIAFALGSVINQALISKQGSYLTNLVIEQVKNRYQFLNQHLNPAIESDNNFTDTTKIFHDSLFNSATAENSMFLTKIAPYLQVGFMPEARSTISLSGPGAYASAYYDFINLQENTIEKTLKASDLIEFKFPENNLSQLTEQEINSLWSFDQASAKYQFEKYVRDYTGGSLSEDNGVDFNKNTALDKNYLLNNKIPSNNVEEAGSKNYVHYIIQLQGDDISYEATCNLFSKNPKNSIIIQRNMNESAKSYFLSDDGESILELNKYRIPERLKNKEKVKVTFIGHGKDEFNTSEFARLSVDSLSNEISSFLDTIKLDISPKNVEVNLLGANMFSYDFNVEETYPGKLLLSIMDKITSTLPDVNKNSITIGANQYEVRINSEGRKELLAHSGKWINKEEAIMSDLSSKEYIFFDSIDNKLKAKSKNIPGLASISEDIKTLLLDASVSPDTKFILNNLKLNIESSIGDYIYYEKLEPVKNIIHNSIDDLIDEFNLLENVSDELYELKKLNNLDEKYLISFEDISKNNSTYSVRFINKSNGESVYVETEKEIFSKYSEHITKEISTIKNSIITDVNGNLLDNIQLDHTSQVNTLNAAFFIQSLIDYSSNKDVLNDLSTSVKVQLYAQLFSTGLNTIYDSIQLVNLISNAVNDTINVLPTITEGIPIVSTILDGINLGAAIKELLDEHDPLLKKELEAKVGVLAINMSLSIAATVASIVGIGAEVTIFLLPIAGISAGIPSLVNNELILHDKATSVVNYFNHLSESKKYGPLKTEDDKILVPIDDLVISEIDFNNNSIKLGTCNILAMEGGSGHTVTGNIDHFFSSPSISSHIPSLSIYSAIGIETENLDFSKKIMMLPNAPSRVFWWETGAVPGLRSLENDGTRLLDSIRDLYPGKFYWRFYAFFDYAITTLKPVYEDTNIKIKLDKDTRNFIMPTITTNEIRNKLSYSFDGAGGTYSLLLSSYPISTNINLSKDDLWIFNIDNEVREISIENGTIKKGKLIKDVLSKIDINKNKLIIGNQTIDFSGDIDNKDRYIFLTCELDDKISLIIEINLVAKSYSLLLSGDKNYLISNLSNTIEKINTLGLDSKNIAYNYTDESNNKYFGAISKTSQKSIIHYKKDSKNILEFYNDSTLEFNSKDFIAEDINVFMKDDINTITGKYYVDNNTDKSIDFSISLVSKNQVKVNGLYLNESVYSSYLDFVKNSDGHHNTSNFMNLFLDNISFWKLFGFENINFVIDKYFTLVGKTNLGYVEFICDNNKNIDIYFGEWKTSSSKSTIFSGNGRNVVVEPIYNPDTGEDISTSLDFSYEPLYGIDRYINKVLIAPDLYTSLININTNYYSNEYYPEIIVLNPNTFHKKVNINLDSSSFEYKWSTEGSDFILVRYLEESNKKILQKIRIKGILSNTQSFNKMSIDFKDIKKLSLGYIMSNFKSFNSENELDRDHLGFKIIDNKTYYYDEDSKLVKGLININNSLFYFDPIEFNLVTGWQTINGKKYYFDINTGAALTSYKIINGKHFYFNNDGVMQLGVFKGPDGFEYFAPANTQNNNIEGQAIVYQSKFLTLNGKKYYFDNDSKAVTGWRIINNEKYYFNPNNAIAAVGLQVIDNNKYYFNPDTAIISKGWQTVNGSRYYFDTDTAIAFNGYKTIDGKHFYFDSDCVVKIGVFSTSNGFEYFAPANTYNNNIEGQAIVYQSKFLTLNGKKYYFDNNSKAVTGWQTIDSKKYYFNTNTAEAATGWQTIDGKKYYFNTNTAEAATGWQTIDGKKYYFNTNTAIASTGYTIINGKHFYFNTDGIMKIGVFKGPNGFEYFAPANTDANNIEGQAILYQNEFLTLNGKKYYFGSDSKAVTGWRIINNKKYYFNPNNAIAAIHLCTINNDKYYFSYDGILQNGYITIERNNFYFDANNESKMVTGVFKGPNGFEYFAPANTYNNNIEGQAIVYQNKFLTLNGKKYYFDNDSKAVTGWQTIDGKKYYFNLNTAEAATGWQTIDGKKYYFNLNTAEAATGWQTIDGKKYYFNTNTFIASTGYTSINGKHFYFNTDGIMQIGVFKGPNGFEYFAPANTHNNNIEGQAILYQNKFLTLNGKKYYFGSDSKAVTGLRTIDGKKYYFNTNTAVAVTGWQTINGKKYYFNTNTSIASTGYTIISGKHFYFNTDGIMQIGVFKGPDGFEYFAPANTDANNIEGQAIRYQNRFLYLHDNIYYFGNNSKAATGWVTIDGNRYYFEPNTAMGANGYKTIDNKNFYFRNGLPQIGVFKGSNGFEYFAPANTDANNIEGQAIRYQNRFLHLLGKIYYFGNNSKAVTGWQTINGKVYYFMPDTAMAAAGGLFEIDGVIYFFGVDGVKAPGIYG

SEQ ID NO: 678 - protein, 2709 aa, Artificial Sequence; identical to SEQ ID NO: 672
  Synthetic amino acid sequence

SEQ ID NO: 679 - protein, 2709 aa, Artificial Sequence
  Synthetic amino acid sequence
SLISKEELIKLAYSIRPRENEYKTILTNLDEYNKLTTNNNENKYLQLKKLNESIDVFMNKYKNSSRNRALSNLKKDILKEVILIKNSNTSPVEKNLHFVWIGGEVSDIALEYIKQWADINAEYNIKLWYDSEAFLVNTLKKAIVESSTTEALQLLEEEIQNPQFDNTKFYKKRMEFIYDRQKRFINYYKSQINKPTVPTIDDIIKSHLVSEYNRDETLLESYRTNSLRKINSNHGIDIRANSLFTEQELLNIYSQELLNRGNLAAASDIVRLLALKNFGGVYLAVAMLPGIHSDLFKTISRPSSIGLDRWEMIKLEAIMKYKKYINNYTSENFDKLDQQLKDNFKLIIESKSEKSEIFSKLENLNVSDLEIKIAFALGSVINQALISKQGSYLTNLVIEQVKNRYQFLNQHLNPAIESDNNFTDTTKIFHDSLFNSATAENSMFLTKIAPYLQVGFMPEARSTISLSGPGAYASAYYDFINLQENTIEKTLKASDLIEFKFPENNLSQLTEQEINSLWSFDQASAKYQFEKYVRDYTGGSLSEDNGVDFNKNTALDKNYLLNNKIPSNNVEEAGSKNYVHYIIQLQGDDISYEATCNLFSKNPKNSIIIQRNMNESAKSYFLSDDGESILELNKYRIPERLKNKEKVKVTFIGHGKDEFNTSEFARLSVDSLSNEISSFLDTIKLDISPKNVEVNLLGANMFSYDFNVEETYPGKLLLSIMDKITSTLPDVNKDSITIGANQYEVRINSEGRKELLAHSGKWINKEEAIMSDLSSKEYIFFDSIDNKLKAKSKNIPGLASISEDIKTLLLDASVSPDTKFILNNLKLNIESSIGDYIYYEKLEPVKNIIHNSIDDLIDEFNLLENVSDELYELKKLNNLDEKYLISFEDISKNNSTYSVRFINKSNGESVYVETEKEIFSKYSEHITKEISTIKNSIITDVNGNLLDNIQLDHTSQVNTLNAAFFIQSLIDYSSNKDVLNDLSTSVKVQLYAQLFSTGLNTIYDSIQLVNLISNAVNDTINVLPTITEGIPIVSTILDGINLGAAIKELLDEHDPLLKKELEAKVGVLAINMSLSIAATVASIVGIGAEVTIFLLPIAGISAGIPSLVNNELILHDKATSVVNYFNHLSESKKYGPLKTEDDKILVPIDDLVISEIDFNNNSIKLGTCNILAMEGGSGHTVTGNIDHFFSSPYISSHIPSLSVYSAIGIKTENLDFSKKIMMLPNAPSRVFWWETGAVPGLRSLENDGTKLLDSIRDLYPGKFYWRFYAFFDYAITTLKPVYEDTNTKIKLDKDTRNFIMPTITTDEIRNKLSYSFDGAGGTYSLLLSSYPISMNINLSKDDLWIFNIDNEVREISIENGTIKKGNLIEDVLSKIDINKNKLIIGNQTIDFSGDIDNKDRYIFLTCELDDKISLIIEINLVAKSYSLLLSGDKNYLISNLSNTIEKINTLGLDSKNIAYNYTDESNNKYFGAISKTSQKSIIHYKKDSKNILEFYNGSTLEFNSKDFIAEDINVFMKDDINTITGKYYVDNNTDKSIDFSISLVSKNQVKVNGLYLNESVYSSYLDFVKNSDGHHNTSNFMNLFLNNISFWKLFGFENINFVIDKYFTLVGKTNLGYVEFICDNNKNIDIYFGEWKTLSSKSTIFSGNGRNVVVEPIYNPDTGEDISTSLDFSYEPLYGIDRYINKVLIAPDLYTSLININTNYYSNEYYPEIIVLNPNTFHKKVNINLDSSSFEYKWSTEGSDFILVRYLEESNKKILQKIRIKGILSNTQSFNKMSIDFKDIKKLSLGYIMSNFKSFNSENELDRDHLGFKIIDNKTYYYDEDSKLVKGLININNSLFYFDPIESNLVTGWQTINGKKYYFDINTGAASTSYKIINGKHFYFNNNGVMQLGVFKGPDGFEYFAPANTQNNNIEGQAIVYQSKFLTLNGKKYYFDNDSKAVTGWRIINNEKYYFNPNNAIAAVGLQVIDNNKYYFNPDTAIISKGWQTVNGSRYYFDTDTAIAFNGYKTIDGKHFYFDSDCVVKIGVFSGSNGFEYFAPANTYNNNIEGQAIVYQSKFLTLNGKKYYFDNNSKAVTGWQTIDSKKYYFNTNTAEAATGWQTIDGKKYYFNTNTAEAATGWQTIDGKKYYFNTNTSIASTGYTIINGKHFYFNTDGIMQIGVFKGPNGFEYFAPANTDANNIEGQAILYQNKFLTLNGKKYYFGSDSKAITGWQTIDGKKYYFNPNNAIAATHLCTINNDKYYFSYDGILQNGYITIERNNFYFDANNESKMVTGVFKGPNGFEYFAPANTHNNNIEGQAIVYQNKFLTLNGKKYYFDNDSKAVTGWQTIDSKKYYFNLNTAVAVTGWQTIDGEKYYFNLNTAEAATGWQTIDGKRYYFNTNTYIASTGYTIINGKHFYFNTDGIMQIGVFKGPDGFEYFAPANTHNNNIEGQAILYQNKFLTLNGKKYYFGSDSKAVTGLRTIDGKKYYFNTNTAVAVTGWQTINGKKYYFNTNTYIASTGYTIISGKHFYFNTDGIMQIGVFKGPDGFEYFAPANTDANNIEGQAIRYQNRFLYLHDNIYYFGNDSKAATGWATIDGNRYYFEPNTAMGANGYKTIDNKNFYFRNGLPQIGVFKGPNGFEYFAPANTDANNIDGQAIRYQNRFLHLLGNIYYFGNNSKAVTGWQTINGKVYYFMPDTAMAAAGGLFEIDGVIYFFGVDGVKAPGIYG

SEQ ID NO: 680 - protein, 2709 aa, Artificial Sequence; identical to SEQ ID NO: 679
  Synthetic amino acid sequence

SEQ ID NO: 681 - protein, 2709 aa, Artificial Sequence; identical to SEQ ID NO: 679
  Synthetic amino acid sequence

SEQ ID NO: 682 - protein, 2709 aa, Artificial Sequence; identical to SEQ ID NO: 665
  Synthetic amino acid sequence

SEQ ID NO: 683 - protein, 2709 aa, Artificial Sequence; identical to SEQ ID NO: 669
  Synthetic amino acid sequence

SEQ ID NO: 684 - protein, 2709 aa, Artificial Sequence
  Synthetic amino acid sequence
SLISKEELIKLAYSIRPRENEYKTILTNLDEYNKLTTNNNENKYLQLKKLNESIDVFMNKYKTSSRNRALSNLKKDILKEVILIKNSNTSPVEKNLHFVWIGGEVSDIALEYIKQWADINAEYNIKLWYDSEAFLVNTLKKAIVESSTTEALQLLEEEIQNPQFDNMKFYKKRMEFIYDRQKRFINYYKSQINKPTVPTIDDIIKSHLVSEYNRDETVLESYRTNSLRKINSNHGIDIRANSLFTEQELLNIYSQELLNRGNLAAASDIVRLLALKNFGGVYLAVAMLPGIHSDLFKTISRPSSIGLDRWEMIKLEAIMKYKKYINNYTSENFDKLDQQLKDNFKLIIESKSEKSEIFSKLENLNVSDLEIKIAFALGSVINQALISKQGSYLTNLVIEQVKNRYQFLNQHLNPAIESDNNFTDTTKIFHDSLFNSATAENSMFLTKIAPYLQVGFMPEARSTISLSGPGAYASAYYDFINLQENTIEKTLKASDLIEFKFPENNLSQLTEQEINSLWSFDQASAKYQFEKYVRDYTGGSLSEDNGVDFNKNTALDKNYLLNNKIPSNNVEEAGSKNYVHYIIQLQGDDISYEATCNLFSKNPKNSIIIQRNMNESAKSYFLSDDGESILELNKYRIPERLKNKEKVKVTFIGHGKDEFNTSEFARLSVDSLSNEISSFLDTIKLDISPKNVEVNLLGANMFSYDFNVEETYPGKLLLSIMDKITSTLPDVNKNSITIGANQYEVRINSEGRKELLAHSGKWINKEEAIMSDLSSKEYIFFDSIDNKLKAKSKNIPGLASISEDIKTLLLDASVSPDTKFILNNLKLNIESSIGDYIYYEKLEPVKNIIHNSIDDLIDEFNLLENVSDELYELKKLNNLDEKYLISFEDISKNNSTYSVRFINKSNGESVYVETEKEIFSKYSEHITKEISTIKNSIITDVNGNLLDNIQLDHTSQVNTLNAAFFIQSLIDYSSNKDVLNDLSTSVKVQLYAQLFSTGLNTIYDSIQLVNLISNAVNDTINVLPTITEGIPIVSTILDGINLGAAIKELLDEHDPLLKKELEAKVGVLAINMSLSIAATVASIVGIGAEVTIFLLPIAGISAGIPSLVNNELILHDKATSVVNYFNHLSESKKYGPLKTEDDKILVPIDDLVISEIDFNNNSIKLGTCNILAMEGGSGHTVTGNIDHFFSSPSISSHIPSLSIYSAIGIETENLDFSKKIMMLPNAPSRVFWWETGAVPGLRSLENDGTRLLDSIRDLYPGKFYWRFYAFFDYAITTLKPVYEDTNIKIKLDKDTRNFIMPTITTNEIRNKLSYSFDGAGGTYSLLLSSYPISTNINLSKDDLWIFNIDNEVREISIENGTIKKGKLIKDVLSKIDINKNKLIIGNQTIDFSGDIDNKDRYIFLTCELDDKISLIIEINLVAKSYSLLLSGDKNYLISNLSNTIEKINTLGLDSKNIAYNYTDESNNKYFGAISKTSQKSIIHYKKDSKNILEFYNDSTLEFNSKDFIAEDINVFMKDDINTITGKYYVDNNTDKSIDFSISLVSKNQVKVNGLYLNESVYSSYLDFVKNSDGHHNTSNFMNLFLDNISFWKLFGFENINFVIDKYFTLVGKTNLGYVEFICDNNKNIDIYFGEWKTSSSKSTIFSGNGRNVVVEPIYNPDTGEDISTSLDFSYEPLYGIDRYINKVLIAPDLYTSLININTNYYSNEYYPEIIVLNPNTFHKKVNINLDSSSFEYKWSTEGSDFILVRYLEESNKKILQKIRIKGILSNTQSFNKMSIDFKDIKKLSLGYIMSNFKSFNSENELDRDHLGFKIIDNKTYYYDEDSKLVKGLININNSLFYFDPIEFNLVTGWQTINGKKYYFDINTGAALTSYKIINGKHFYFNNDGVMQLGVFKGPDGFEYFAPANTQNNNIEGQAIVYQSKFLTLNGKKYYFDNDSKAVTGWRIINNEKYYFNPNNAIAAVGLQVIDNNKYYFNPDTAIISKGWQTVNGSRYYFDTDTAIAFNGYKTIDGKHFYFDSDCVVKIGVFSTSNGFEYFAPANTYNNNIEGQAIVYQSKFLTLNGKKYYFDNNSKAVTGWQTIDSKKYYFNTNTAEAATGWQTIDGKKYYFNTNTAEAATGWQTIDGKKYYFNTNTAIASTGYTIINGKHFYFNTDGIMQIGVFKGPNGFEYFAPANTDANNIEGQAILYQNEFLTLNGKKYYFGSDSKAVTGWRIINNKKYYFNPNNAIAAIHLCTINNDKYYFSYDGILQNGYITIERNNFYFDANNESKMVTGVFKGPNGFEYFAPANTHNNNIEGQAIVYQNKFLTLNGKKYYFDNDSKAVTGWQTIDGKKYYFNLNTAEAATGWQTIDGKKYYFNLNTAEAATGWQTIDGKKYYFNTNTFIASTGYTSINGKHFYFNTDGIMQIGVFKGPNGFEYFAPANTDANNIEGQAILYQNKFLTLNGKKYYFGSDSKAVTGLRTIDGKKYYFNTNTAVAVTGWQTINGKKYYFNTNTSIASTGYTIISGKHFYFNTDGIMQIGVFKGPDGFEYFAPANTDANNIEGQAIRYQNRFLYLHDNIYYFGNNSKAATGWVTIDGNRYYFEPNTAMGANGYKTIDNKNFYFRNGLPQIGVFKGSNGFEYFAPANTDANNIEGQAIRYQNRFLHLLGKIYYFGNNSKAVTGWQTINGKVYYFMPDTAMAAAGGLFEIDGVIYFFGVDGVKAPGIYG

SEQ ID NO: 685 - protein, 2709 aa, Artificial Sequence; identical to SEQ ID NO: 665
  Synthetic amino acid sequence

SEQ ID NO: 686 - protein, 2709 aa, Artificial Sequence; identical to SEQ ID NO: 664
  Synthetic amino acid sequence

SEQ ID NO: 687 - protein, 2709 aa, Artificial Sequence; identical to SEQ ID NO: 665
  Synthetic amino acid sequence

SEQ ID NO: 688 - protein, 2709 aa, Artificial Sequence; identical to SEQ ID NO: 665
  Synthetic amino acid sequence

SEQ ID NO: 689 - protein, 2709 aa, Artificial Sequence
  Synthetic amino acid sequence
SLISKEELIKLAYSIRPRENEYKTILTNLDEYNKLTTNNNENKYLQLKKLNESIDVFMNKYKTSSRNRALSNLKKDILKEVILIKNSNTSPVEKNLHFVWIGGEVSDIALEYIKQWADINAEYNIKLWYDSEAFLVNTLKKAIVESSTTEALQLLEEEIQNPQFDNMKFYKKRMEFIYDRQKRFINYYKSQINKPTVPTIDDIIKSHLVSEYNRDETVLESYRTNSLRKINSNHGIDIRANSLFTEQELLNIYSQELLNRGNLAAASDIVRLLALKNFGGVYLAVAMLPGIHSDLFKTISRPSSIGLDRWEMIKLEAIMKYKKYINNYTSENFDKLDQQLKDNFKLIIESKSEKSEIFSKLENLNVSDLEIKIAFALGSVINQALISKQGSYLTNLVIEQVKNRYQFLNQHLNPAIESDNNFTDTTKIFHDSLFNSATAENSMFLTKIAPYLQVGFMPEARSTISLSGPGAYASAYYDFINLQENTIEKTLKASDLIEFKFPENNLSQLTEQEINSLWSFDQASAKYQFEKYVRDYTGGSLSEDNGVDFNKNTALDKNYLLNNKIPSNNVEEAGSKNYVHYIIQLQGDDISYEATCNLFSKNPKNSIIIQRNMNESAKSYFLSDDGESILELNKYRIPERLKNKEKVKVTFIGHGKDEFNTSEFARLSVDSLSNEISSFLDTIKLDISPKNVEVNLLGANMFSYDFNVEETYPGKLLLSIMDKITSTLPDVNKNSITIGANQYEVRINSEGRKELLAHSGKWINKEEAIMSDLSSKEYIFFDSIDNKLKAKSKNIPGLASISEDIKTLLLDASVSPDTKFILNNLKLNIESSIGDYIYYEKLEPVKNIIHNSIDDLIDEFNLLENVSDELYELKKLNNLDEKYLISFEDISKNNSTYSVRFINKSNGESVYVETEKEIFSKYSEHITKEISTIKNSIITDVNGNLLDNIQLDHTSQVNTLNAAFFIQSLIDYSSNKDVLNDLSTSVKVQLYAQLFSTGLNTIYDSIQLVNLISNAVNDTINVLPTITEGIPIVSTILDGINLGAAIKELLDEHDPLLKKELEAKVGVLAINMSLSIAATVASIVGIGAEVTIFLLPIAGISAGIPSLVNNELILHDKATSVVNYFNHLSESKKYGPLKTEDDKILVPIDDLVISEIDFNNNSIKLGTCNILAMEGGSGHTVTGNIDHFFSSPSISSHIPSLSIYSAIGIETENLDFSKKIMMLPNAPSRVFWWETGAVPGLRSLENDGTRLLDSIRDLYPGKFYWRFYAFFDYAITTLKPVYEDTNIKIKLDKDTRNFIMPTITTNEIRNKLSYSFDGAGGTYSLLLSSYPISTNINLSKDDLWIFNIDNEVREISIENGTIKKGKLIKDVLSKIDINKNKLIIGNQTIDFSGDIDNKDRYIFLTCELDDKISLIIEINLVAKSYSLLLSGDKNYLISNLSNTIEKINTLGLDSKNIAYNYTDESNNKYFGAISKTSQKSIIHYKKDSKNILEFYNDSTLEFNSKDFIAEDINVFMKDDINTITGKYYVDNNTDKSIDFSISLVSKNQVKVNGLYLNESVYSSYLDFVKNSDGHHNTSNFMNLFLDNISFWKLFGFENINFVIDKYFTLVGKTNLGYVEFICDNNKNIDIYFGEWKTSSSKSTIFSGNGRNVVVEPIYNPDTGEDISTSLDFSYEPLYGIDRYINKVLIAPDLYTSLININTNYYSNEYYPEIIVLNPNTFHKKVNINLDSSSFEYKWSTEGSDFILVRYLEESNKKILQKIRIKGILSNTQSFNKMSIDFKDIKKLSLGYIMSNFKSFNSENELDRDHLGFKIIDNKTYYYDEDSKLVKGLININNSLFYFDPIEFNLVTGWQTINGKKYYFDINTGAALTSYKIINGKHFYFNNDGVMQLGVFKGPDGFEYFAPANTQNNNIEGQAIVYQSKFLTLNGKKYYFDNDSKAVTGWRIINNEKYYFNPNNAIAAVGLQVIDNNKYYFNPDTAIISKGWQTVNGSRYYFDTDTAIAFNGYKTIDGKHFYFDSDCVVKIGVFSTSNGFEYFAPANTYNNNIEGQAIVYQSKFLTLNGKKYYFDDNSKAVTGWQTIDSKKYYFNTNTAEAATGWQTIDGKKYYFNTNTAEAATGWQTIDGKKYYFNTNTAIASTGYTIINGKHFYFNTDGIMQIGVFKGPNGFEYFAPANTDANNIEGQAILYQNEFLTLNGKKYYFGSDSKAVTGWRIINNKKYYFNPNNAIAAIHLCTINNDKYYFSYDGILQNGYITIERNNFYFDANNESKMVTGVFKGPNGFEYFAPANTYNNNIEGQAIVYQNKFLTLNGKKYYFDNDSKAVTGWQTIDGKKYYFNLNTAEAATGWQTIDGKKYYFNLNTAEAATGWQTIDGKKYYFNTNTFIASTGYTSINGKHFYFNTDGIMQIGVFKGPNGFEYFAPANTHNNNIEGQAILYQNKFLTLNGKKYYFGSDSKAVTGLRTIDGKKYYFNTNTAVAVTGWQTINGKKYYFNTNTSIASTGYTIISGKHFYFNTDGIMQIGVFKGPDGFEYFAPANTDANNIEGQAIRYQNRFLYLHDNIYYFGNNSKAATGWVTIDGNRYYFEPNTAMGANGYKTIDNKNFYFRNGLPQIGVFKGSNGFEYFAPANTDANNIEGQAIRYQNRFLHLLGKIYYFGNNSKAVTGWQTINGKVYYFMPDTAMAAAGGLFEIDGVIYFFGVDGVKAPGIYG

SEQ ID NO: 690 - protein, 2709 aa, Artificial Sequence
  Synthetic amino acid sequence
SLISKEELIKLAYSIRPRENEYKTILTNLDEYNKLTTNNNENKYLQLKKLNESIDVFMNKYKTSSRNRALSNLKKDILKEVILIKNSNTSPVEKNLHFVWIGGEVSDIALEYIKQWADINAEYNIKLWYDSEAFLVNTLKKAIVESSTTEALQLLEEEIQNPQFDNMKFYKKRMEFIYDRQKRFINYYKSQINKPTVPTIDDIIKSHLVSEYNRDETVLESYRTNSLRKINSNHGIDIRANSLFTEQELLNIYSQGLLNRGNLAAASDIVRLLALKNFGGVYLAVAMLPGIHSDLFKTISRPSSIGLDRWEMIKLEAIMKYKKYINNYTSENFDKLDQQLKDNFKLIIESKSEKSEIFSKLENLNVSDLEIKIAFALGSVINQALISKQGSYLTNLVIEQVKNRYQFLNQHLNPAIESDNNFTDTTKIFHDSLFNSATAENSMFLTKIAPYLQVGFMPEARSTISLSGPGAYASAYYDFINLQENTIEKTLKASDLIEFKFPENNLSQLTEQEINSLWSFDQASAKYQFEKYVRDYTGGSLSEDNGVDFNKNTALDKNYLLNNKIPSNNVEEAGSKNYVHYIIQLQGDDISYEATCNLFSKNPKNSIIIQRNMNESAKSYFLSDDGESILELNKYRIPERLKNKEKVKVTFIGHGKDEFNTSEFARLSVDSLSNEISSFLDTIKLDISPKNVEVNLLGANMFSYDFNVEETYPGKLLLSIMDKITSTLPDVNKNSITIGANQYEVRINSEGRKELLAHSGKWINKEEAIMSDLSSKEYIFFDSIDNKLKAKSKNIPGLASISEDIKTLLLDASVSPDTKFILNNLKLNIESSIGDYIYYEKLEPVKNIIHNSIDDLIDEFNLLENVSDELYELKKLNNLDEKYLISFEDISKNNSTYSVRFINKSNGESVYVETEKEIFSKYSEHITKEISTIKNSIITDVNGNLLDNIQLDHTSQVNTLNAAFFIQSLIDYSSNKDVLNDLSTSVKVQLYAQLFSTGLNTIYDSIQLVNLISNAVNDTINVLPTITEGIPIVSTILDGINLGAAIKELLDEHDPLLKKELEAKVGVLAINMSLSIAATVASIVGIGAEVTIFLLPIAGISAGIPSLVNNELILHDKATSVVNYFNHLSESKKYGPLKTEDDKILVPIDDLVISEIDFNNNSIKLGTCNILAMEGGSGHTVTGNIDHFFSSPSISSHIPSLSIYSAIGIETENLDFSKKIMMLPNAPSRVFWWETGAVPGLRSLENDGTRLLDSIRDLYPGKFYWRFYAFFDYAITTLKPVYEDTNIKIKLDKDTRNFIMPTITTNEIRNKLSYSFDGAGGTYSLLLSSYPISTNINLSKDDLWIFNIDNEVREISIENGTIKKGKLIKDVLSKIDINKNKLIIGNQTIDFSGDIDNKDRYIFLTCELDDKISLIIEINLVAKSYSLLLSGDKNYLISNLSNIIEKINTLGLDSKNIAYNYTDESNNKYFGAISKTSQKSIIHYKKDSKNILEFYNDSTLEFNSKDFIAEDINVFMKDDINTITGKYYVDNNTDKSIDFSISLVSKNQVKVNGLYLNESVYSSYLDFVKNSDGHHNTSNFMNLFLDNISFWKLFGFENINFVIDKYFTLVGKTNLGYVEFICDNNKNIDIYFGEWKTSSSKSTIFSGNGRNVVVEPIYNPDTGEDISTSLDFSYEPLYGIDRYINKVLIAPDLYTSLININTNYYSNEYYPEIIVLNPNTFHKKVNINLDSSSFEYKWSTEGSDFILVRYLEESNKKILQKIRIKGILSNTQSFNKMSIDFKDIKKLSLGYIMSNFKSFNSENELDRDHLGFKIIDNKTYYYDEDSKLVKGLININNSLFYFDPIEFNLVTGWQTINGKKYYFDINTGAALISYKIINGKHFYFNNDGVMQLGVFKGPDGFEYFAPANTQNNNIEGQAIVYQSKFLTLNGKKYYFDNDSKAVTGWRIINNEKYYFNPNNAIAAVGLQVIDNNKYYFNPDTAIISKGWQTVNGSRYYFDTDTAIAFNGYKTIDGKHFYFDSDCVVKIGVFSTSNGFEYFAPANTYNNNIEGQAIVYQSKFLTLNGKKYYFDNNSKAVTGWQTIDSKKYYFNTNTAEAATGWQTIDGKKYYFNTNTAEAATGWQTIDGKKYYFNTNTAIASTGYTIINGKHFYFNTDGIMQIGVFKGPNGFEYFAPANTDANNIEGQAILYQNEFLTLNGKKYYFGSDSKAVTGWRIINNKKYYFNPNNAIAAIHLCTINNDKYYFSYDGILQNGYITIERNNFYFDANNESKMVTGVFKGPNGFEYFAPANTHNNNIEGQAIVYQNKFLTLNGKKYYFDNDSKAVTGWQTIDGKKYYFNLNTAEAATGWQTIDGKKYYFNLNTAEAATGWQTIDGKKYYFNTNTFIASTGYTSINGKHFYFNTDGIMQIGVFKGPNGFEYFAPANTHNNNIEGQAILYQNKFLTLNGKKYYFGSDSKAVTGLRTIDGKKYYFNTNTAVAVTGWQTINGKKYYFNTNTSIASTGYTIISGKHFYFNTDGIMQIGVFKGPDGFEYFAPANTDANNIEGQAIRYQNRFLYLHDNIYYFGNNSKAATGWVTIDGNRYYFEPNTAMGANGYKTIDNKNFYFRNGLPQIGVFKGSNGFEYFAPANTDANNIEGQAIRYQNRFLHLLGKIYYFGNNSKAVTGWQTINGKVYYFMPDTAMAAAGGLFEIDGVIYFFGVDGVKAPGIYG

SEQ ID NO: 691 - protein, 2709 aa, Artificial Sequence; identical to SEQ ID NO: 665
  Synthetic amino acid sequence

SEQ ID NO: 692 - protein, 2709 aa, Artificial Sequence
  Synthetic amino acid sequence
SLISKEELIKLAYSIRPRENEYKTILTNLDEYNKLTTNNNENKYLQLKKLNESIDVFMNKYKTSSRNRALSNLKKDILKEVILIKNSNTSPVEKNLHFVWIGGEVSDIALEYIKQWADINAEYNIKLWYDSEAFLVNTLKKAIVESSTTEALQLLEEEIQNPQFDNMKFYKKRMEFIYDRQKRFINYYKSQINKPTVPTIDDIIKSHLVSEYNRDETVLESYRTNSLRKINSNHGIDIRANSLFTEQELLNIYSQELLNRGNLAAASDIVRLLALKNFGGVYLAVAMLPGIHSDLFKTISRPSSIGLDRWEMIKLEAIMKYKKYINNYTSENFDKLDQQLKDNFKLIIESKSEKSEIFSKLENLNVSDLEIKIAFALGSVINQALISKQGSYLTNLVIEQVKNRYQFLNQHLNPAIESDNNFTDTTKIFHDSLFNSATAENSMFLTKIAPYLQVGFMPEARSTISLSGPGAYASAYYDFINLQENTIEKTLKASDLIEFKFPENNLSQLTEQEINSLWSFDQASAKYQFEKYVRDYTGGSLSEDNGVDFNKNTALDKNYLLNNKIPSNNVEEAGSKNYVHYIIQLQGDDISYEATCNLFSKNPKNSIIIQRNMNESAKSYFLSDDGESILELNKYRIPERLKNKEKVKVTFIGHGKDEFNTSEFARLSVDSLSNEISSFLDTIKLDISPKNVEVNLLGANMFSYDFNVEETYPGKLLLSIMDKITSTLPDVNKNSITIGANQYEVRINSEGRKELLAHSGKWINKEEAIMSDLSSKEYIFFDSIDNKLKAKSKNIPGLASISEDIKTLLLDASVSPDTKFILNNLKLNIESSIGDYIYYEKLEPVKNIIHNSIDDLIDEFNLLENVSDELYELKKLNNLDEKYLISFEDISKNNSTYSVRFINKSNGESVYVETEKEIFSKYSEHITKEISTIKNSIITDVNGNLLDNIQLDHTSQVNTLNAAFFIQSLIDYSSNKDVLNDLSTSVKVQLYAQLFSTGLNTIYDSIQLVNLISNAVNDTINVLPTITEGIPIVSTILDGINLGAAIKELLDEHDPLLKKELEAKVGVLAINMSLSIAATVASIVGIGAEVTIFLLPIAGISAGIPSLVNNELILHDKATSVVNYFNHLSESKKYGPLKTEDDKILVPIDDLVISEIDFNNNSIKLGTCNILAMEGGSGHTVTGNIDHFFSSPSISSHIPSLSIYSAIGIETENLDFSKKIMMLPNAPSRVFWWETGAVPGLRSLENDGTRLLDSIRDLYPGKFYWRFYAFFDYAITTLKPVYEDTNIKIKLDKDTRNFIMPTITTNEIRNKLSYSFDGAGGTYSLLLSSYPISTNINLSKDDLWIFNIDNEVREISIENGTIKKGKLIKDVLSKIDINKNKLIIGNQTIDFSGDIDNKDRYIFLTCELDDKISLIIEINLVAKSYSLLLSGDKNYLISNLSNTIEKINTLGLDSKNIAYNYTDESNNKYFGAISKTSQKSIIHYKKDSKNILEFYNDSTLEFNSKDFIAEDINVFMKDDINTITGKYYVDNNTDKSIDFSISLVSKNQVKVNGLYLNESVYSSYLDFVKNSDGHHNTSNFMNLFLDNISFWKLFGFENINFVIDKYFTLVGKTNLGYVEFICDNNKNIDIYFGEWKTSSSKSTIFSGNGRNVVVEPIYNPDTGEDISTSLDFSYEPLYGIDRYINKVLIAPDLYTSLININTNYYSNEYYPEIIVLNPNTFHKKVNINLDSSSFEYKWSTEGSDFILVRYLEESNKKILQKIRIKGILSNTQSFNKMSIDFKDIKKLSLGYIMSNFKSFNSENELDRDHLGFKIIDNKTYYYDEDSKLVKGLININNSLFYFDPIEFNLVTGWQTINGKKYYFDINTGAALTSYKIINGKHFYFNNDGVMQLGVFKGPDGFEYFAPANTQNNNIEGQAIVYQSKFLTLNGKKYYFDNNSKAVTGWRIINNEKYYFNPNNAIAAVGLQVIDNNKYYFNPDTAIISKGWQTVNGSRYYFDTDTAIAFNGYKTIDGKHFYFDSDCVVKIGVFSTSNGFEYFAPANTYNNNIEGQAIVYQSKFLTLNGKKYYFDNNSKAVTGWQTIDSKKYYFNTNTAEAATGWQTIDGKKYYFNTNTAEAATGWQTIDGKKYYFNTNTAIASTGYTIINGKHFYFNTDGIMQIGVFKGPNGFEYFAPANTDANNIEGQAILYQNEFLTLNGKKYYFGSDSKAVTGWRIINNKKYYFNPNNAIAAIHLCTINNDKYYFSYDGILQNGYITIERNNFYFDANNESKMVTGVFKGPNGFEYFAPANTHNNNIEGQAIVYQNKFLTLNGKKYYFDNDSKAVTGWQTIDGKKYYFNLNTAEAATGWQTIDGKKYYFNLNTAEAATGWQTIDGKKYYFNTNTFIASTGYTSINGKHFYFNTDGIMQIGVFKGPNGFEYFAPANTDANNIEGQAILYQNKFLTLNGKKYYFGSDSKAVTGLRTIDGKKYYFNTNTAVAVTGWQTINGKKYYFNTNTSIASTGYTIISGKHFYFNTDGIMQIGVFKGPDGFEYFAPANTDANNIEGQAIRYQNRFLYLHDNIYYFGNNSKAATGWVTIDGNRYYFEPNTAMGANGYKTIDNKNFYFRNGLPQIGVFKGSNGFEYFAPANTDANNIEGQAIRYQNRFLHLLGKIYYFGNNSKAVTGWQTINGKVYYFMPDTAMAAAGGLFEIDGVIYFFGVDGVKAPGIYG

SEQ ID NO: 693 - protein, 2709 aa, Artificial Sequence
  Synthetic amino acid sequence
SLISKEELIKLAYSIRPRENEYKTILTNLDEYNKLTTNNNENKYLQLKKLNESIDVFMNKYKTSSRNRALSNLKKDILKEVILIKNSNTSPVEKNLHFVWIGGEVSDIALEYIKQWADINAEYNIKLWYDSEAFLVNTLKKAIVESSTTEALQLLEEEIQNPQFDNMKFYKKRMEFIYDRQKRFINYYKSQINKPTVPTIDDIIKSHLVSEYNRDETVLESYRTNSLRKINSNHGIDIRANSLFTEQELLNIYSQELLNRGNLAAASDIVRLLALKNFGGVYLAVAMLPGIHSDLFKTISRPSSIGLDRWEMIKLEAIMKYKKYINNYTSENFDKLDQQLKDNFKLIIESKSEKSEIFSKLENLNVSDLEIKIAFALGSVINQALISKQGSYLTNLVIEQVKNRYQFLNQHLNPAIESDNNFTDTTKIFHDSLFNSATAENSMFLTKIAPYLQVGFMPEARSTISLSGPGAYASAYYDFINLQENTIEKTLKASDLIEFKFPENNLSQLTEQEINSLWSFDQASAKYQFEKYVRDYTGGSLSEDNGVDFNKNTALDKNYLLNNKIPSNNVEEAGSKNYVHYIIQLQGDDISYEATCNLFSKNPKNSIIIQRNMNESAKSYFLSDDGESILELNKYRIPERLKNKEKVKVTFIGHGKDEFNTSEFARLSVDSLSNEISSFLDTIKLDISPKNVEVNLLGANMFSYDFNVEETYPGKLLLSIMDKITSTLPDVNKNSITIGANQYEVRINSEGRKELLAHSGKWINKEEAIMSDLSSKEYIFFDSIDNKLKAKSKNIPGLASISEDIKTLLLDASVSPDTKFILNNLKLNIESSIGDYIYYEKLEPVKNIIHNSIDDLIDEFNLLENVSDELYELKKLNNLDEKYLISFEDISKNNSTYSVRFINKSNGESVYVETEKEIFSKYSEHITKEISTIKNSIITDVNGNLLDNIQLDHTSQVNTLNAAFFIQSLIDYSSNKDVLNDLSTSVKVQLYAQLFSTGLNTIYDSIQLVNLISNAVNDTINVLPTITEGIPIVSTILDGINLGAAIKELLDEHDPLLKKELEAKVGVLAINMSLSIAATVASIVGIGAEVTIFLLPIAGISAGIPSLVNNELILHDKATSVVNYFNHLSESKKYGPLKTEDDKILVPIDDLVISEIDFNNNSIKLGTCNILAMEGGSGHTVTGNIDHFFSSPSISSHIPSLSIYSAIGIETENLDFSKKIMMLPNAPSRVFWWETGAVPGLRSLENDGTRLLDSIRDLYPGKFYWRFYAFFDYAITTLKPVYEDTNIKIKLDKDTRNFIMPTITTNEIRNKLSYSFDGAGGTYSLLLSSYPISTNINLSKDDLWIFNIDNEVREISIENGTIKKGKLIKDVLSKIDINKNKLIIGNQTIDFSGDIDNKDRYIFLTCELDDKISLIIEINLVAKSYSLLLSGNKNYLISNLSNTIEKINTLGLDSKNIAYNYTDESNNKYFGAISKTSQKSIIHYKKDSKNILEFYNDSTLEFNSKDFIAEDINVFMKDDINTITGKYYVDNNTDKGIDFSISLVSKNQVKVNGLYLNESVYSSYLDFVKNSDGHHNTSNFMNLFLDNISFWKLFGFENINFVIDKYFTLVGKTNLGYVEFICDNNKNIDIYFGEWKTSSSKSTIFSGNGRNVVVEPIYNPDTGEDISTSLDFSYEPLYGIDRYINKVLIAPDLYTSLININTNYYSNEYYPEIIVLNPNTFHKKVNINLDSSSFEYKWSTEGSDFILVRYLEESNKKILQKIRIKGILSNTQSFNKMSIDFKDIKKLSLGYIMSNFKSFNSENELDRDHLGFKIIDNKTYYYDEDSKLVKGLININNSLFYFDPIEFNLVTGWQTINGKKYYFDINTGAALTSYKIINGKHFYFNNDGVMQLGVFKGPDGFEYFAPANTQNNNIEGQAIVYQSKFLTLNGKKYYFDNDSKAVTGWRIINNEKYYFNPNNAIAAVGLQVIDNNKYYFNPDTAIISKGWQTVNGSRYYFDTDTAIAFNGYKTIDGKHFYFDSDCVVKIGVFSTSNGFEYFAPANTYNNNIEGQAIVYQSKFLTLNGKKYYFDDNSKAVTGWQTIDSKKYYFNTNTAEAATGWQTIDGKKYYFNTNTAEAATGWQTIDGKKYYFNTNTAIASTGYTIINGKHFYFNTDGIMQIGVFKGPNGFEYFAPANTDANNIEGQAILYQNEFLTLNGKKYYFGSDSKAVTGWRIINNKKYYFNPNNAIAAIHLCTINNDKYYFSYDGILQNGYITIERNNFYFDANNESKMVTGVFKGPNGFEYFAPANTHNNNIEGQAIVYQNKFLTLNGKKYYFDNDSKAVTGWQTIDGKKYYFNLNTAEAATGWQTIDGKKYYFNLNTAEAATGWQTIDGKKYYFNTNTFIASTGYTSINGKHFYFNTDGIMQIGVFKGPNGFEYFAPANTHNNNIEGQAILYQNKFLTLNGKKYYFGSDSKAVTGLRTIDGKKYYFNTNTAVAVTGWQTINGKKYYFNTNTSIASTGYTIISGKHFYFNTDGIMQIGVFKGPDGFEYFAPANTDANNIEGQAIRYQNRFLYLHDNIYYFGNNSKAATGWVTIDGNRYYFEPNTAMGANGYKTIDNKNFYFRNGLPQIGVFKGSNGFEYFAPANTDANNIEGQAIRYQNRFLHLLGKIYYFGNNSKAVTGWQTINGKVYYFMPDTAMAAAGGLFEIDGVIYFFGVDGVKAPGIYG

SEQ ID NO: 694 - protein, 2709 aa, Artificial Sequence; identical to SEQ ID NO: 693
  Synthetic amino acid sequence

SEQ ID NO: 695 - protein, 2709 aa, Artificial Sequence; identical to SEQ ID NO: 665
  Synthetic amino acid sequence

SEQ ID NO: 696 - protein, 2709 aa, Artificial Sequence; identical to SEQ ID NO: 674
  Synthetic amino acid sequence

SEQ ID NO: 697 - protein, 2709 aa, Artificial Sequence
  Synthetic amino acid sequence
SLISKEELIKLAYSIRPRENEYKTILTNLDEYNKLTTNNNENKYLQLKKLNESIDVFMNKYKTSSRNRALSNLKKDILKEVILIKNSNTSPVEKNLHFVWIGGEVSDIALEYIKQWADINAEYNIKLWYDSEAFLVNTLKKAIVESSTTEALQLLEEEIQNPQFDNMKFYKKRMEFIYDRQKRFINYYKSQINKPTVPTIDDIIKSHLVSEYNRDETVLESYRTNSLRKINSNHGIDIRANSLFTEQELLNIYSQELLNRGNLAAASDIVRLLALKNFGGVYLAVAMLPGIHSDLFKTISRPSSIGLDRWEMIKLEAIMKYKKYINNYTSENFDKLDQQLKDNFKLIIESKSEKSEIFSKLENLNVSDLEIKIAFALGSVINQALISKQGSYLTNLVIEQVKNRYQFLNQHLNPAIESDNNFTDTTKIFHDSLFNSATAENSMFLTKIAPYLQVGFMPEARSTISLSGPGAYASAYYDFINLQENTIEKTLKASDLIEFKFPENNLSQLTEQEINSLWSFDQASAKYQFEKYVRDYTGGSLSEDNGVDFNKNTALDKNYLLNNKIPSNNVEEAGSKNYVHYIIQLQGDDISYEATCNLFSKNPKNSIIIQRNMNESAKSYFLSDDGESILELNKYRIPERLKNKEKVKVTFIGHGKDEFNTSEFARLSVDSLSNEISSFLDTIKLDISPKNVEVNLLGANMFSYDFNVEETYPGKLLLSIMDKITSTLPDVNKNSITIGANQYEVRINSEGRKELLAHSGKWINKEEAIMSDLSSKEYIFFDSIDNKLKAKSKNIPGLASISEDIKTLLLDASVSPDTKFILNNLKLNIESSIGDYIYYEKLEPVKNIIHNSIDDLIDEFNLLENVSDELYELKKLNNLDEKYLISFEDISKNNSTYSVRFINKSNGESVYVETEKEIFSKYSEHITKEISTIKNSIITDVNGNLLDNIQLDHTSQVNTLNAAFFIQSLIDYSSNKDVLNDLSTSVKVQLYAQLFSTGLNTIYDSIQLVNLISNAVNDTINVLPTITEGIPIVSTILDGINLGAAIKELLDEHDPLLKKELEAKVGVLAINMSLSIAATVASIVGIGAEVTIFLLPIAGISAGIPSLVNNELILHDKATSVVNYFNHLSESKKYGPLKTEDDKILVPIDDLVISEIDFNNNSIKLGTCNILAMEGGSGHTVTGNIDHFFSSPSISSHIPSLSIYSAIGIETENLDFSKKIMMLPNAPSRVFWWETGAVPGLRSLENDGTRLLDSIRDLYPGKFYWRFYAFFDYAITTLKPVYEDTNIKIKLDKDTRNFIMPTITTNEIRNKLSYSFDGAGGTYSLLLSSYPISTNINLSKDDLWIFNIDNEVREISIENGTIKKGKLIKDVLSKIDINKNKLIIGNQTIDFSGDIDNKDRYIFLTCELDDKISLIIEINLVAKSYSLLLSGDKNYLISNLSNTIEKINTLGLDSKNIAYNYTDESNNKYFGAISKTSQKSIIHYKKDSKNILEFYNDSTLEFNSKDFIAEDINVFMKDDINTITGKYYVDNNTDKSIDFSISLVSKNQVKVNGLYLNESVYSSYLDFVKNSDGHHNTSNFMNLFLDNISFWKLFGFENINFVIDKYFTLVGKTNLGYVEFICDNNKNIDIYFGEWKTSSSKSTIFSGNGRNVVVEPIYNPNTGEDISTSLDFSYEPLYGIDRYINKVLIAPDLYTSLININTNYYSNEYYPEIIVLNPNTFHKKVNINLDSSSFEYKWSTEGSDFILVRYLEESNKKILQKIRIKGILSNTQSFNKMSIDFKDIKKLSLGYIMSNFKSFNSENELDRDHLGFKIIDNKTYYYDEDSKLVKGLININNSLFYFDPIEFNLVTGWQTINGKKYYFDINTGAALTSYKIINGKHFYFNNDGVMQLGVFKGPDGFEYFAPANTQNNNIEGQAIVYQSKFLTLNGKKYYFDNNSKAVTGWRIINNEKYYFNPNNAIAAVGLQVIDNNKYYFNPDTAIISKGWQTVNGSRYYFDTDTAIAFNGYKTIDGKHFYFDSDCVVKIGVFSTSNGFEYFAPANTYNNNIEGQAIVYQSKFLTLNGKKYYFDNNSKAVTGWQTIDSKKYYFNTNTAEAATGWQTIDGKKYYFNTNTAEAATGWQTIDGKKYYFNTNTAIASTGYTIINGKHFYFNTDGIMQIGVFKGPNGFEYFAPANTDANNIEGQAILYQNEFLTLNGKKYYFGSDSKAVTGWRIINNKKYYFNPNNAIAAIHLCTINNDKYYFSYDGILQNGYITIERNNFYFDANNESKMVTGVFKGPNGFEYFAPANTHNNNIEGQAIVYQNKFLTLNGKKYYFDNDSKAVTGWQTIDGKKYYFNLNTAEAATGWQTIDGKKYYFNLNTAEAATGWQTIDGKKYYFNTNTFIASTGYTSINGKHFYFNTDGIMQIGVFKGPNGFEYFAPANTDANNIEGQAILYQNKFLTLNGKKYYFGSDSKAVTGLRTIDGKKYYFNTNTAVAVTGWQTINGKKYYFNTNTSIASTGYTIISGKHFYFNTDGIMQIGVFKGPDGFEYFAPANTDANNIEGQAIRYQNRFLYLHDNIYYFGNNSKAATGWVTIDGNRYYFEPNTAMGANGYKTIDNKNFYFRNGLPQIGVFKGSNGFEYFAPANTDANNIEGQAIRYQNRFLHLLGKIYYFGNNSKAVTGWQTINGKVYYFMPDTAMAAAGGLFEIDGVIYFFGVDGVKAPGIYG

SEQ ID NO: 698 - protein, 2709 aa, Artificial Sequence
  Synthetic amino acid sequence
SLISKEELIKLAYSIRPRENEYKTILTNLDEYNKLTTNNNENKYLQLKKLNESIDVFMNKYKTSSRNRALSNLKKDILKEVILIKNSNTSPVEKNLHFVWIGGEVSDIALEYIKQWADINAEYNIKLWYDSEAFLVNTLKKAIVESSTTEALQLLEEEIQNPQFDNMKFYKKRMEFIYDRQKRFINYYKSQINKPTVPTIDDIIKSHLVSEYNRDETVLESYRTNSLRKINSNHGIDIRANSLFTEQELLNIYSQELLNRGNLAAASDIVRLLALKNFGGVYLAVAMLPGIHSDLFKTISRPSSIGLDRWEMIKLEAIMKYKKYINNYTSENFDKLDQQLKDNFKLIIESKSEKSEIFSKLENLNVSDLEIKIAFALGSVINQALISKQGSYLTNLVIEQVKNRYQFLNQHLNPAIESDNNFTDTTKIFHDSLFNSATAENSMFLTKIAPYLQVGFMPEARSTISLSGPGAYASAYYDFINLQENTIEKTLKASDLIEFKFPENNLSQLTEQEINSLWSFDQASAKYQFEKYVRDYTGGSLSEDNGVDFNKNTALDKNYLLNNKIPSNNVEEAGSKNYVHYIIQLQGDDISYEATCNLFSKNPKNSIIIQRNMNESAKSYFLSDDGESILELNKYRIPERLKNKEKVKVTFIGHGKDEFNTSEFARLSVDSLSNEISSFLDTIKLDISPKNVEVNLLGANMFSYDFNVEETYPGKLLLSIMDKITSTLPDVNKNSITIGANQYEVRINSEGRKELLAHSGKWINKEEAIMSDLSSKEYIFFDSIDNKLKAKSKNIPGLASISEDIKTLLLDASVSPDTKFILNNLKLNIESSIGDYIYYEKLEPVKNIIHNSIDDLIDEFNLLENVSDELYELKKLNNLDEKYLISFEDISKNNSTYSVRFINKSNGESVYVETEKEIFSKYSEHITKEISTIKNSIITDVNGNLLDNIQLDHTSQVNTLNAAFFIQSLIDYSSNKDVLNDLSTSVKVQLYAQLFSTGLNTIYDSIQLVNLISNAVNDTINVLPTITEGIPIVSTILDGINLGAAIKELLDEHDPLLKKELEAKVGVLAINMSLSIAATVASIVGIGAEVTIFLLPIAGISAGIPSLVNNELILHDKATSVVNYFNHLSESKKYGPLKTEDDKILVPIDDLVISEIDFNNNSIKLGTCNILAMEGGSGHTVTGNIDHFFSSPSISSHIPSLSIYSAIGIETENLDFSKKIMMLPNAPSRVFWWETGAVPGLRSLENDGTRLLDSIRDLYPGKFYWRFYAFFDYAITTLKPVYEDTNIKIKLDKDTRNFIMPTITTNEIRNKLSYSFDGAGGTYSLLLSSYPISTNINLSKDDLWIFNIDNEVREISIENGTIKKGKLIKDVLSKIDINKNKLIIGNQTIDFSGDIDNKDRYIFLTCELDDKISLIIEINLVAKSYSLLLSGDKNYLISNLSNTIEKINTLGLDSKNIAYNYTDESNNKYFGAISKTSQKSIIHYKKDSKNILEFYNDSTLEFNSKDFIAEDINVFMKDDVNTITGKYYVDNNTDKSIDFSISLVSKNQVKVNGLYLNESVYSSYLDFVKNSDGHHNTSNFMNLFLDNISFWKLFGFENINFVIDKYFTLVGKTNLGYVEFICDNNKNIDIYFGEWKTSSSKSTIFSGNGRNVVVEPIYNPDTGEDISTSLDFSYEPLYGIDRYINKVLIAPDLYTSLININTNYYSNEYYPEIIVLNPNTFHKKVNINLDSSSFEYKWSTEGSDFILVRYLEESNKKILQKIRIKGILSNTQSFNKMSIDFKDIKKLSLGYIMSNFKSFNSENELDRDHLGFKIIDNKTYYYDEDSKLVKGLININNSLFYFDPIEFNLVTGWQTINGKKYYFDINTGAALTSYKIINGKHFYFNNDGVMQLGVFKGPDGFEYFAPANTQNNNIEGQAIVYQSKFLTLNGKKYYFDNNSKAVTGWRIINNEKYYFNPNNAIAAVGLQVIDNNKYYFNPDTAIISKGWQTVNGSRYYFDTDTAIAFNGYKTIDGKHFYFDSDCVVKIGVFSTSNGFEYFAPANTYNNNIEGQAIVYQSKFLTLNGKKYYFDNNSKAVTGWQTIDSKKYYFNTNTAEAATGWQTIDGKKYYFNTNTAEAATGWQTIDGKKYYFNTNTAIASTGYTIINGKHFYFNTDGIMQIGVFKGPNGFEYFAPANTDANNIEGQAILYQNEFLTLNGKKYYFGSDSKAVTGWRIINNKKYYFNPNNAIAAIHLCTINNDKYYFSYDGILQNGYITIERNNFYFDANNESKMVTGVFKGPNGFEYFAPANTHNNNIEGQAIVYQNKFLTLNGKKYYFDNDSKAVTGWQTIDGKKYYFNLNTAEAATGWQTIDGKKYYFNLNTAEAATGWQTIDGKKYYFNTNTFIASTGYTSINGKHFYFNTDGIMQIGVFKGPNGFEYFAPANTHNNNIEGQAILYQNKFLTLNGKKYYFGSDSKAVTGLRTIDGKKYYFNTNTAVAVTGWQTINGKKYYFNTNTSIASTGYTIISGKHFYFNTDGIMQIGVFKGPDGFEYFAPANTDANNIEGQAIRYQNRFLYLHDNIYYFGNNSKAATGWVTIDGNRYYFEPNTAMGANGYKTIDNKNFYFRNGLPQIGVFKGSNGFEYFAPANTDANNIEGQAIRYQNRFLHLLGKIYYFGNNSKAVTGWQTINGKVYYFMPDTAMAAAGGLFEIDGVIYFFGVDGVKAPGIYG

SEQ ID NO: 699 - protein, 2709 aa, Artificial Sequence
  Synthetic amino acid sequence
SLISKEELIKLAYSIRPRENEYKTILTNLDEYNKLTTNNNENKYLQLKKLNESIDVFMNKYKTSSRNRALSNLKKDILKEVILIKNSNTSPVEKNLHFVWIGGEVSDIALEYIKQWADINAEYNIKLWYDSEAFLVNTLKKAIVESSTTEALQLLEEEIQNPQFDNMKFYKKRMEFIYDRQKRFINYYKSQINKPTVPTIDDIIKSHLVSEYNRDETLLESYRTNSLRKINSNHGIDIRANSLFTEQELLNIYSQELLNRGNLAAASDIVRLLALKNFGGVYLAVAMLPGIHSDLFKTISRPSSIGLDRWEMIKLEAIMKYKKYINNYTSENFDKLDQQLKDNFKLIIESKSEKSEIFSKLENLNVSDLEIKIAFALGSVINQALISKQGSYLTNLVIEQVKNRYQFLNQHLNPAIESDNNFTDTTKIFHDSLFNSATAENSMFLTKIAPYLQVGFMPEARSTISLSGPGAYASAYYDFINLQENTIEKTLKASDLIEFKFPENNLSQLTEQEINSLWSFDQASAKYQFEKYVRDYTGGSLSEDNGVDFNKNTALDKNYLLNNKIPSNNVEEAGSKNYVHYIIQLQGDDISYEATCNLFSKNPKNSIIIQRNMNESAKSYFLSDDGESILELNKYRIPERLKNKEKVKVTFIGHGKDEFNTSEFARLSVDSLSNEISSFLDTIKLDISPKNVEVNLLGANMFSYDFNVEETYPGKLLLSIMDKITSTLPDVNKNSITIGANQYEVRINSEGRKELLAHSGKWINKEEAIMSDLSSKEYIFFDSIDNKLKAKSKNIPGLASISEDIKTLLLDASVSPDTKFILNNLKLNIESSIGDYIYYEKLEPVKNIIHNSIDDLIDEFNLLENVSDELYELKKLNNLDEKYLISFEDISKNNSTYSVRFINKSNGESVYVETEKEIFSKYSEHITKEISTIKNSIITDVNGNLLDNIQLDHTSQVNTLNAAFFIQSLIDYSSNKDVLNDLSTSVKVQLYAQLFSTGLNTIYDSIQLVNLISNAVNDTINVLPTITEGIPIVSTILDGINLGAAIKELLDEHDPLLKKELEAKVGVLAINMSLSIAATVASIVGIGAEVTIFLLPIAGISAGIPSLVNNELILHDKATSVVNYFNHLSESKKYGPLKTEDDKILVPIDDLVISEIDFNNNSIKLGTCNILAMEGGSGHTVTGNIDHFFSSPSISSHIPSLSIYSAIGIETENLDFSKKIMMLPNAPSRVFWWETGAVPGLRSLENDGTRLLDSIRDLYPGKFYWRFYAFFDYAITTLKPVYEDTNIKIKLDKDTRNFIMPTITTNEIRNKLSYSFDGAGGTYSLLLSSYPISTNINLSKDDLWIFNIDNEVREISIENGTIKKGKLIKDVLSKIDINKNKLIIGNQTIDFSGDIDNKDRYIFLTCELDDKISLIIEINLVAKSYSLLLSGNKNYLISNLSNTIEKINTLGLDSKNIAYNYTDESNNKYFGAISKTSQKSIIHYKKDSKNILEFYNDSTLEFNSKDFIAEDINVFMKDDINTITGKYYVDNNTDKGIDFSISLVSKNQVKVNGLYLNESVYSSYLDFVKNSDGHHNTSNFMNLFLDNISFWKLFGFENINFVIDKYFTLVGKTNLGYVEFICDNNKNIDIYFGEWKTSSSKSTIFSGNGRNVVVEPIYNPDTGEDISTSLDFSYEPLYGIDRYINKVLIAPDLYTSLININTNYYSNEYYPEIIVLNPNTFHKKVNINLDSSSFEYKWSTEGSDFILVRYLEESNKKILQKIRIKGILSNTQSFNKMSIDFKDIKKLSLGYIMSNFKSFNSENELDRDHLGFKIIDNKTYYYDEDSKLVKGLININNSLFYFDPIEFNLVTGWQTINGKKYYFDINTGAALTSYKIINGKHFYFNNDGVMQLGVFKGPDGFEYFAPANTQNNNIEGQAIVYQSKFLTLNGKKYYFDNDSKAVTGWRIINNEKYYFNPNNAIAAVGLQVIDNNKYYFNPDTAIISKGWQTVNGSRYYFDTDTAIAFNGYKTIDGKHFYFDSDCVVKIGVFSTSNGFEYFAPANTYNNNIEGQAIVYQSKFLTLNGKKYYFDNNSKAVTGWQTIDSKKYYFNTNTAEAATGWQTIDGKKYYFNTNTAEAATGWQTIDGKKYYFNTNTAIASTGYTIINGKHFYFNTDGIMQIGVFKGPNGFEYFAPANTDANNIEGQAILYQNEFLTLNGKKYYFGSDSKAVTGWRIINNKKYYFNPNNAIAAIHLCTINNDKYYFSYDGILQNGYITIERNNFYFDANNESKMVTGVFKGPNGFEYFAPANTHNNNIEGQAIVYQNKFLTLNGKKYYFDNDSKAVTGWQTIDGKKYYFNLNTAEAATGWQTIDGKKYYFNLNTAEAATGWQTIDGKKYYFNTNTFIASTGYTSINGKHFYFNTDGIMQIGVFKGPNGFEYFAPANTHNNNIEGQAILYQNKFLTLNGKKYYFGSDSKAVTGLRTIDGKKYYFNTNTAVAVTGWQTINGKKYYFNTNTSIASTGYTIISGKHFYFNTDGIMQIGVFKGPDGFEYFAPANTDANNIEGQAIRYQNRFLYLHDNIYYFGNNSKAATGWVTIDGNRYYFEPNTAMGANGYKTIDNKNFYFRNGLPQIGVFKGSNGFEYFAPANTDANNIEGQAIRYQNRFLHLLGKIYYFGNNSKAVTGWQTINGKVYYFMPDTAMAAAGGLFEIDGVIYFFGVDGVKAPGIYG

SEQ ID NO: 700 - protein, 2709 aa, Artificial Sequence; identical to SEQ ID NO: 675
  Synthetic amino acid sequence

SEQ ID NO: 701 - protein, 2709 aa, Artificial Sequence
  Synthetic amino acid sequence
SLISKEELIKLAYSIRPRENEYKTILTNLDEYNKLTTNNNENKYLQLKKLNESIDVFMNKYKNSSRNRALSNLKKDILKEVILIKNSNTSPVEKNLHFVWIGGEVSDIALEYIKQWADINAEYNIKLWYDSEAFLVNTLKKAIVESSTTEALQLLEEEIQNPQFDNMKFYKKRMEFIYDRQKRFVNYYKSQINKPTVPTIDDIIKSHLVSEYNRDETLLESYRTNSLRKINSNHGIDIRANSLFTEQELLNIYSQELLNRGNLAAASDIVRLLALKNFGGVYLAVAMLPGIHSDLFKTISRPSSIGLDRWEMIKLEAIMKYKKYINNYTSENFDKLDQQLKDNFKLIIESKSEKSEIFSKLENLNVSDLEIKIAFALGSVINQALISKQGSYLTNLVIEQVKNRYQFLNQHLNPAIESDNNFTDTTKIFHDSLFNSATAENSMFLTKIAPYLQVGFMPEARSTISLSGPGAYASAYYDFINLQENTIEKTLKASDLIEFKFPENNLSQLTEQEINSLWSFDQASAKYQFEKYVRDYTGGSLSEDNEVDFNKNTALDKNYLLNNKIPSNNVEEAGSKNYVHYIIQLQGDDISYEATCNLFSKNPKNSIIIQRNMNESAKSYFLSDDGESILELNKYRIPERLKNKEKVKVTFIGHGKDEFNTSEFARLSVDSLSNEISSFLDTIKLDISPKNVEVNLLGANMFSYDFNVEETYPGKLLLSIMDKITSTLPDVNKDSITIGANQYEVRINSEGRKELLAHSGKWINKEEAIMSDLSSKEYIFFDSIDNKLKAKSKNIPGLASISEDIKTLLLDTSVSPDTKFILNNLKLNIESSVGDYIYYEKLEPVKNIIHNSIDDLIDEFNLLENVSDELYELKKLNNLDEKYLISFEDISKNNSTYSVRFINKSNGESVYVETEKEIFSKYSEHITKEISTIKNSIITDVNGNLLDNIQLDHTSQVNTLNAAFFIQSLIDYSSNKDLLNDLSTSVKVQLYAQLFSTGLNTIYDSIQLVNLISNAVNDTINVLPTITEGIPIVSTILDGINLGAAIKELLDEHDPLLKKELEAKVGVLAINMSLSIAATVASIVGIGAEVTIFLLPIAGISAGIPSLVNNELILHDKATSVVNYFNHLSESKEYGPLKTEDDKILVPIDDLVISEIDFNNNAIKLGTCNILAMEGGSGHTVTGNIDHFFSSPSISSHIPSLSIYSAIGIKTENLDFSKKIMMLPNAPSRVFWWETGAVPGLRSLENNGTKLLDSIRDLYPGKFYWRFYAFFDYAITTLKPVYEDTNIKIKLDKDTRNFIMPTITTNEIRNKLSYSFDGAGGTYSLLLSSYPISTNINLSKDDLWIFNIDNEVREISIENGTIKKGKLIKDVLSKIDINKNKLIIGNQTIDFSGDIDNKDRYIFLTCELDDKISLIIEINLVAKSYSLLLSGDKNYLISNLSNTIEKINTLGLDSKNIAYNYTDESNNKYFGAISKTSQKSIIHYKKDSKNILEFYNGSTLEFNSKDFIAEDINVFMKDDINTITGKYYVDNNTDKSIDFSISLVSKNQAKVNGLYLNESVYSSYLDFVKNADGHHNTSNFMNLFLDNISFWKLFGFENINFVVDKYFTLVGKTNLGYVEFICDNNKNIDIYFGEWKTSSSKSTIFSGNGRNVVVEPIYNPDTGEDISTSLDFSYEPLYGIDRYINKVLIAPDLYTSLININTNYYSNEYYPEIIVLNPNTFHKKVNINLDSSSFEYKWSTEGSDFILVRYLEESNKKILQKIRIKGILSNTQSFNKMSIDFKDIKKLSLVYIMSNFKSFNSENELDRDHLGFKIIDNKTYYYDEASKLVKGLININNSLFYFDPIESNLVTGWQTINGKKYYFDINTGAALTSYKIINGKHFYFNNNGVMQLGVFKGPDRFEYFAPANTQNNNIEGQAIVYQSKFLTLNGKKYYFDNDSKAVTGWRIINNEKYYFNPNNAIAAVGLQVIDNNKYYFNPDTAIISKGWQTVNGSRYYFDTDTAIAFNGYKTIDGKHFYFDSDCVVKIGVFSGSNGFEYFAPANTYNNNIEGQAIVYQSKFLTLNGKKYYFDNNSKAVTGWQTIDSKKYYFNTNTAEAATGWQTIDGKKYYFNTNTAEAATGWQTIDGKKYYFNTNTSIASTGYTIINGKHFYFNTDGIMQIGVFKGPNGFEYFAPANTDANNIEGQAILYQNKFLTLNGKKYYFASDSKAVTGWRIINNKKYYFNPNNAIAATHLYTINNDKYYFSYDGILQNGYITIERNNFYFDANNESKMVTGVFKGPNGFEYFAPANTHNNNIEGQAIVYQNKFLTLNGKKYYFDNDSKAVTGWQTIDGKKYYFNLNTAVAVTGWQTIDGKKYYFNLNTAEAATGWQTIDGKKYYFNTNTFIASTGYTSINGKHFYFNTDGIMQIGVFKGPNGFEYFAPANTHNNNIEGQAILYQNKFLTLNGKKYYFASDSKAVTGLRTIDGKKYYFNTNTAVAATGWQTINGKKYYFNTNTSIASTGYTIINGKHFYFNTDGIMQIGVFKGPDGFEYFAPANTDANNIEGQAIRYQNRFLYLHDNIYYFGNNSKAATGWVTIDGRRYYFEPNTAIGANGYKIIDNKNFYFRNGLPQIGVFKGPNGFEYFAPANTDANNIDGQAIRYQNRFLHLLGNIYYFGNNSKAVTGWQTINGNMYYFMPDTAMAAAGGLFEIDGVIYFFGVDGVKAPGIYG

SEQ ID NO: 702 - protein, 2709 aa, Artificial Sequence; identical to SEQ ID NO: 665
  Synthetic amino acid sequence

SEQ ID NO: 703 - protein, 2709 aa, Artificial Sequence
  Synthetic amino acid sequence
SLISKEELIKLAYSIRPRENEYKTILTNLDEYNKLTTNNNENKYLQLKKLNESIDVFMNKYKNSSRNRALSNLKKDILKEVILIKNSNTSPVEKNLHFVWIGGEVSDIALEYIKQWADINAEYNIKLWYDSEAFLVNTLKKAIVESSTTEALQLLEEEIQNPQFDNMKFYKKRMEFIYDRQKRFVNYYKSQINKPTVPTIDDIIKSHLVSEYNRDETLLESYRTNSLRKINSNHGIDIRANSLFTEQELLNIYSQELLNRGNLAAASDIVRLLALKNFGGVYLAVAMLPGIHSDLFKTISRPSSIGLDRWEMIKLEAIMKYKKYINNYTSENFDKLDQQLKDNFKLIIESKSEKSEIFSKLENLNVSDLEIKIAFALGSVINQALISKQGSYLTNLVIEQVKNRYQFLNQHLNPAIESDNNFTDTTKIFHDSLFNSATAENSMFLTKIAPYLQVGFMPEARSTISLSGPGAYASAYYDFINLQENTIEKTLKASDLIEFKFPENNLSQLTEQEINSLWSFDQASAKYQFEKYVRDYTGGSLSEDNEVDFNKNTALDKNYLLNNKIPSNNVEEAGSKNYVHYIIQLQGDDISYEATCNLFSKNPKNSIIIQRNMNESAKSYFLSDDGESILELNKYRIPERLKNKEKVKVTFIGHGKDEFNTSEFARLSVDSLSNEISSFLDTIKLDISPKNVEVNLLGANMFSYDFNVEETYPGKLLLSIMDKITSTLPDVNKDSITIGANQYEVRINSEGRKELLAHSGKWINKEEAIMSDLSSKEYIFFDSIDNKLKAKSKNIPGLASISEDIKTLLLDTSVSPDTKFILNNLKLNIESSVGDYIYYEKLEPVKNIIHNSIDDLIDEFNLLENVSDELYELKKLNNLDEKYLISFEDISKNNSTYSVRFINKSNGESVYVETEKEIFSKYSEHITKEISTIKNSIITDVNGNLLDNIQLDHTSQVNTLNAAFFIQSLIDYSSNKDLLNDLSTSVKVQLYAQLFSTGLNTIYDSIQLVNLISNAVNDTINVLPTITEGIPIVSTILDGINLGAAIKELLDEHDPLLKKELEAKVGVLAINMSLSIAATVASIVGIGAEVTIFLLPIAGISAGIPSLVNNELILHDKATSVVNYFNHLSESKEYGPLKTEDDKILVPIDDLVISEIDFNNNAIKLGTCNILAMEGGSGHTVTGNIDHFFSSPSISSHIPSLSIYSAIGIKTENLDFSKKIMMLPNAPSRVFWWETGAVPGLRSLENNGTKLLDSIRDLYPGKFYWRFYAFFDYAITTLKPVYEDTNIKIKLDKDTRNFIMPTITTNEIRNKLSYSFDGAGGTYSLLLSSYPISTNINLSKDDLWIFNIDNEVREISIENGTIKKGKLIKDVLSKIDINKNKLIIGNQTIDFSGDIDNKDRYIFLTCELDDKISLIIEINLVAKSYSLLLSGDKNYLISNLSNTIEKINTLGLDSKNIAYNYTDESNNKYFGAISKTSQKSIIHYKKDSKNILEFYNGSTLEFNSKDFIAEDINVFMKDDINTITGKYYVDNNTDKSIDFSISLVSKNQAKVNGLYLNESVYSSYLDFVKNADGHHNTSNFMNLFLDNISFWKLFGFENINFVVDKYFTLVGKTNLGYVEFICDNNKNIDIYFGEWKTSSSKSTIFSGNGRNVVVEPIYNPDTGEDISTSLDFSYEPLYGIDRYINKVLIAPDLYTSLININTNYYSNEYYPEIIVLNPNTFHKKVNINLDSSSFEYKWSTEGSDFILVRYLEESNKKILQKIRIKGILSNTQSFNKMSIDFKDIKKLSLVYIMSNFKSFNSENELDRDHLGFKIIDNKTYYYDEASKLVKGLININNSLFYFDPIESNLVTGWQTINGKKYYFDINTGAALTSYKIINGKHFYFNNNGVMQLGVFKGPDRFEYFAPANTQNNNIEGQAIVYQSKFLTLNGKKYYFDNDSKAVTGWRIINNEKYYFNPNNAIAAVGLQVIDNNKYYFNPDTAIISKGWQTVNGSRYYFDTDTAIAFNGYKTIDGKHFYFDSDCVVKIGVFSGSNGFEYFAPANTYNNNIEGQAIVYQSKFLTLNGKKYYFDNNSKAVTGWQTIDSKKYYFNTNTAEAATGWQTIDGKKYYFNTNTAEAATGWQTIDGKKYYFNTNTSIASTGYTIINGKHFYFNTDGIMQIGVFKGPDGFEYFAPANTDANNIEGQAILYQNKFLTLNGKKYYFASDSKAVTGWRIINNKKYYFNPNNAIAATHLYTINNDKYYFSYDGILQNGYITIERNNFYFDANNESKMVTGVFKGPNGFEYFAPANTHNNNIEGQAIVYQNKFLTLNGKKYYFDNDSKAVTGWQTIDGKKYYFNLNTAVAVTGWQTIDGKKYYFNLNTAEAATGWQTIDGKKYYFNTNTFIASTGYTSINGKHFYFNTDGIMQIGVFKGPNGFEYFAPANTHNNNIEGQAILYQNKFLTLNGKKYYFASDSKAVTGLRTIDGKKYYFNTNTAEAATGWQTINGKKYYFNTNTSIASTGYTIINGKHFYFNTDGIMQIGVFKGPDGFEYFAPANTDANNIEGQAIRYQNRFLYLHDNIYYFGNNSKAATGWVTIDGRRYYFEPNTAIGANGYKIIDNKNFYFRNGLPQIGVFKGPNGFEYFAPANTDANNIDGQAIRYQNRFLHLLGNIYYFGNNSKAVTGWQTINGNMYYFMPDTAMAAAGGLFEIDGVIYFFGVDGVKAPGIYG

SEQ ID NO: 704 - protein, 2709 aa, Artificial Sequence; identical to SEQ ID NO: 675
  Synthetic amino acid sequence

SEQ ID NO: 705 - protein, 2709 aa, Artificial Sequence
  Synthetic amino acid sequence
SLISKEELIKLAYSIRPRENEYKTILTNLDEYNKLTTNNNENKYLQLKKLNESIDVFMNKYKNSSRNRALSNLKKDILKEVILIKNSNTSPVEKNLHFVWIGGEVSDIALEYIKQWADINAEYNIKLWYDSEAFLVNTLKKAIVESSTTEALQLLEEEIQNPQFDNMKFYKKRMEFIYDRQKRFVNYYKSQINKPTVPTIDDIIKSHLVSEYNRDETLLESYRTNSLRKINSNHGIDIRANSLFTEQELLNIYSQELLNRGNLAAASDIVRLLALKNFGGVYLAVAMLPGIHSDLFKTISRPSSIGLDRWEMIKLEAIMKYKKYINNYTSENFDKLDQQLKDNFKLIIESKSEKSEIFSKLENLNVSDLEIKIAFALGSVINQALISKQGSYLTNLVIEQVKNRYQFLNQHLNPAIESDNNFTDTTKIFHDSLFNSATAENSMFLTKIAPYLQVGFMPEARSTISLSGPGAYASAYYDFINLQENTIEKTLKASDLIEFKFPENNLSQLTEQEINSLWSFDQASAKYQFEKYVRDYTGGSLSEDNEVDFNKNTALDKNYLLNNKIPSNNVEEAGSKNYVHYIIQLQGDDISYEATCNLFSKNPKNSIIIQRNMNESAKSYFLSDDGESILELNKYRIPERLKNKEKVKVTFIGHGKDEFNTSEFARLSVDSLSNEISSFLDTIKLDISPKNVEVNLLGANMFSYDFNVEETYPGKLLLSIMDKITSTLPDVNKDSITIGANQYEVRINSEGRKELLAHSGKWINKEEAIMSDLSSKEYIFFDSIDNKLKAKSKNIPGLASISEDIKTLLLDTSVSPDTKFILNNLKLNIESSVGDYIYYEKLEPVKNIIHNSIDDLIDEFNLLENVSDELYELKKLNNLDEKYLISFEDISKNNSTYSVRFINKSNGESVYVETEKEIFSKYSEHITKEISTIKNSIITDVNGNLLDNIQLDHTSQVNTLNAAFFIQSLIDYSSNKDLLNDLSTSVKVQLYAQLFSTGLNTIYDSIQLVNLISNAVNDTINVLPTITEGIPIVSTILDGINLGAAIKELLDEHDPLLKKELEAKVGVLAINMSLSIAATVASIVGIGAEVTIFLLPIAGISAGIPSLVNNELILHDKATSVVNYFNHLSESKEYGPLKTEDDKILVPIDDLVISEIDFNNNAIKLGTCNILAMEGGSGHTVTGNIDHFFSSPSISSHIPSLSIYSAIGIKTENLDFSKKIMMLPNAPSRVFWWETGAVPGLRSLENNGTKLLDSIRDLYPGKFYWRFYAFFDYAITTLKPVYEDTNIKIKLDKDTRNFIMPTITTNEIRNKLSYSFDGAGGTYSLLLSSYPISTNINLSKDDLWIFNIDNEVREISIENGTIKKGKLIKDVLSKIDINKNKLIIGNQTIDFSGDIDNKDRYIFLTCELDDKISLIIEINLVAKSYSLLLSGDKNYLISNLSNTIEKINTLGLDSKNIAYNYTDESNNKYFGAISKTSQKSIIHYKKDSKNILEFYNGSTLEFNSKDFIAEDINVFMKDDINTITGKYYVDNNTDKSIDFSISLVSKNQAKVNGLYLNESVYSSYLDFVKNADGHHNTSNFMNLFLDNISFWKLFGFENINFVVDKYFTLVGKTNLGYVEFICDNNKNIDIYFGEWKTSSSKSTIFSGNGRNVVVEPIYNPDTGEDISTSLDFSYEPLYGIDRYINKVLIAPDLYTSLININTNYYSNEYYPEIIVLNPNTFHKKVNINLDSSSFEYKWSTEGSDFILVRYLEESNKKILQKIRIKGILSNTQSFNKMSIDFKDIKKLSLVYIMSNFKSFNSENELDRDHLGFKIIDNKTYYYDEASKLVKGLININNSLFYFDPIESNLVTGWQTINGKKYYFDINTGAALTSYKIINGKHFYFNNNGVMQLGVFKGPDRFEYFAPANTQNNNIEGQAIVYQSKFLTLNGKKYYFDNDSKAVTGWRIINNEKYYFNPNNAIAAVGLQVIDNNKYYFNPDTAIISKGWQTVNGSRYYFDTDTAIAFNGYKTIDGKHFYFDSDCVVKIGVFSGSNGFEYFAPANTYNNNIEGQAIVYQSKFLTLNGKKYYFDNNSKAVTGWQTIDSKKYYFNTNTAEAATGWQTIDGKKYYFNTNTAEAATGWQTIDGKKYYFNTNTSIASTGYTIINGKHFYFNTDGIMQIGVFKGPNGFEYFAPANTDANNIEGQAILYQNKFLTLNGKKYYFASDSKAVTGWRIINNKKYYFNPNNAIAATHLYTINNDKYYFSYDGILQNGYITIERNNFYFDANNESKMVTGVFKGPNGFEYFAPANTHNNNIEGQAIVYQNKFLTLNGKKYYFDNDSKAVTGWQTIDGKKYYFNLNTAVAVTGWQTIDGKKYYFNLNTAEAATGWQTIDGKKYYFNTNTFIASTGYTSINGKHFYFNTDGIMQIGVFKGPNGFEYFAPANTHNNNIEGQAILYQNKFLTLNGKKYYFASDSKAVTGLRTIDGKKYYFNTNTAVAVTGWQTINGKKYYFNTNTSIASTGYTIISGKHFYFNTDGIMQIGVFKGPDGFEYFAPANTDANNIEGQAIRYQNRFLYLHDNIYYFGNNSKAATGWVTIDGRRYYFEPNTAIGANGYKIIDNKNFYFRNGLPQIGVFKGPNGFEYFAPANTDANNIEGQAIRYQNRFLHLLGNIYYFGNNSKAVTGWQTINGNMYYFMPDTAMAAAGGLFEIDGVIYFFGVDGVKAPGIYG

SEQ ID NO: 706 - protein, 2709 aa, Artificial Sequence
  Synthetic amino acid sequence
SLISKEELIKLAYSIRPRENEYKTILTNLDEYNKLTTNNNENKYLQLKKLNESIDVFMNKYKNSSRNRALSNLKKDILKEVILIKNSNTSPVEKNLHFVWIGGEVSDIALEYIKQWADINAEYNIKLWYDSEAFLVNTLKKAIVESSTTEALQLLEEEIQNPQFDNMKFYKKRMEFIYDRQKRFVNYYKSQINKPTVPTIDDIIKSHLVSEYNRDETLLESYRTNSLRKINSNHGIDIRANSLFTEQELLNIYSQELLNRGNLAAASDIVRLLALKNFGGVYLAVAMLPGIHSDLFKTISRPSSIGLDRWEMIKLEAIMKYKKYINNYTSENFDKLDQQLKDNFKLIIESKSEKSEIFSKLENLNVSDLEIKIAFALGSVINQALISKQGSYLTNLVIEQVKNRYQFLNQHLNPAIESDNNFTDTTKIFHDSLFNSATAENSMFLTKIAPYLQVGFMPEARSTISLSGPGAYASAYYDFINLQENTIEKTLKASDLIEFKFPENNLSQLTEQEINSLWSFDQASAKYQFEKYVRDYTGGSLSEDNEVDFNKNTALDKNYLLNNKIPSNNVEEAGSKNYVHYIIQLQGDDISYEATCNLFSKNPKNSIIIQRNMNESAKSYFLSDDGESILELNKYRIPERLKNKEKVKVTFIGHGKDEFNTSEFARLSVDSLSNEISSFLDTIKLDISPKNVEVNLLGANMFSYDFNVEETYPGKLLLSIMDKITSTLPDVNKDSITIGANQYEVRINSEGRKELLAHSGKWINKEEAIMSDLSSKEYIFFDSIDNKLKAKSKNIPGLASISEDIKTLLLDTSVSPDTKFILNNLKLNIESSVGDYIYYEKLEPVKNIIHNSIDDLIDEFNLLENVSDELYELKKLNNLDEKYLISFEDISKNNSTYSVRFINKSNGESVYVETEKEIFSKYSEHITKEISTIKNSIITDVNGNLLDNIQLDHTSQVNTLNAAFFIQSLIDYSSNKDLLNDLSTSVKVQLYAQLFSTGLNTIYDSIQLVNLISNAVNDTINVLPTITEGIPIVSTILDGINLGAAIKELLDEHDPLLKKELEAKVGVLAINMSLSIAATVASIVGIGAEVTIFLLPIAGISAGIPSLVNNELILHDKATSVVNYFNHLSESKEYGPLKTEDDKILVPIDDLVISEIDFNNNAIKLGTCNILAMEGGSGHTVTGNIDHFFSSPSISSHIPSLSIYSAIGIKTENLDFSKKIMMLPNAPSRVFWWETGAVPGLRSLENNGTKLLDSIRDLYPGKFYWRFYAFFDYAITTLKPVYEDTNIKIKLDKDTRNFIMPTITTNEIRNKLSYSFDGAGGTYSLLLSSYPISTNINLSKDDLWIFNIDNEVREISIENGTIKKGKLIKDVLSKIDINKNKLIIGNQTIDFSGDIDNKDRYIFLTCELDDKISLIIEINLVAKSYSLLLSGDKNYLISNLSNTIEKINTLGLDSKNIAYNYTDESNNKYFGAISKTSQKSIIHYKKDSKNILEFYNGSTLEFNSKDFIAEDINVFMKDDINTITGKYYVDNNTDKSIDFSISLVSKNQAKVNGLYLNESVYSSYLDFVKNADGHHNTSNFMNLFLDNISFWKLFGFENINFVVDKYFTLVGKTNLGYVEFICDNNKNIDIYFGEWKTSSSKSTIFSGNGRNVVVEPIYNPDTGEDISTSLDFSYEPLYGIDRYINKVLIAPDLYTSLININTNYYSNEYYPEIIVLNPNTFHKKVNINLDSSSFEYKWSTEGSDFILVRYLEESNKKILQKIRIKGILSNTQSFNKMSIDFKDIKKLSLVYIMSNFKSFNSENELDRDHLGFKIIDNKTYYYDEASKLVKGLININNSLFYFDPIESNLVTGWQTINGKKYYFDINTGAALTSYKIINGKHFYFNNNGVMQLGVFKGPDRFEYFAPANTQNNNIEGQAIVYQSKFLTLNGKKYYFDNDSKAVTGWRIINNEKYYFNPNNAIAAVGLQVIDNNKYYFNPDTAIISKGWQTVNGSRYYFDTDTAIAFNGYKTIDGKHFYFDSDCVVKIGVFSGSNGFEYFAPANTYNNNIEGQAIVYQSKFLTLNGKKYYFDNNSKAVTGWQTIDSKKYYFNTNTAEAATGWQTIDGKKYYFNTNTAEAATGWQTIDGKKYYFNTNTSIASTGYTIINGKHFYFNTDGIMQIGVFKGPDGFEYFAPANTDANNIEGQAILYQNKFLTLNGKKYYFASDSKAVTGWRIINNKKYYFNPNNAIAATHLYTINNDKYYFSYDGILQNGYITIERNNFYFDANNESKMVTGVFKGPNGFEYFAPANTHNNNIEGQAIVYQNKFLTLNGKKYYFDNDSKAVTGWQTIDGKKYYFNLNTAVAVTGWQTIDGKKYYFNLNTAEAATGWQTIDGKKYYFNTNTFIASTGYTSINGKHFYFNTDGIMQIGVFKGPNGFEYFAPANTHNNNIEGQAILYQNKFLTLNGKKYYFASDSKAVTGLRTIDGKKYYFNTNTAVAVTGWQTINGKKYYFNTNTSIASTGYTIINGKHFYFNTDGIMQIGVFKGPDGFEYFAPANTDANNIEGQAIRYQNRFLYLHDNIYYFGNNSKAATGWVTIDGRRYYFEPNTAIGANGYKIIDNKNFYFRNGLPQIGVFKGPNGFEYFAPANTDANNIDGQAIRYQNRFLHLLGNIYYFGNNSKAVTGWQTINGNMYYFMPDTAMAAAGGLFEIDGVIYFFGVDGVKAPGIYG

SEQ ID NO: 707 - protein, 2709 aa, Artificial Sequence; identical to SEQ ID NO: 672
  Synthetic amino acid sequence

SEQ ID NO: 708 - protein, 2709 aa, Artificial Sequence; identical to SEQ ID NO: 690
  Synthetic amino acid sequence

SEQ ID NO: 709 - protein, 2709 aa, Artificial Sequence; identical to SEQ ID NO: 706
  Synthetic amino acid sequence

SEQ ID NO: 710 - protein, 2709 aa, Artificial Sequence
  Synthetic amino acid sequence
SLISKEELIKLAYSIRPRENEYKTILTNLDEYNKLTTNNNENKYLQLKKLNESIDVFMNKYKTSSRNRALSNLKKDILKEVILIKNSNTSPVEKNLHFVWIGGEVSDIALEYIKQWADINAEYNIKLWYDSEAFLVNTLKKAIVESSTTEALQLLEEEIQNPQFDNMKFYKKRMEFIYDRQKRFINYYKSQINKPTVPTIDDIIKSHLVSEYNRDETVLESYRTNSLRKINSNHGIDIRANSLFTEQELLNIYSQELLNRGNLAAASDIVRLLALKNFGGVYLAVAMLPGIHSDLFKTISRPSSIGLDRWEMIKLEAIMKYKKYINNYTSENFDKLDQQLKDNFKLIIESKSEKSEIFSKLENLNVSDLEIKIAFALGSVINQALISKQGSYLTNLVIEQVKNRYQFLNQHLNPAIESDNNFTDTTKIFHDSLFNSATAENSMFLTKIAPYLQVGFMPEARSTISLSGPGAYASAYYDFINLQENTIEKTLKASDLIEFKFPENNLSQLTEQEINSLWSFDQASAKYQFEKYVRDYTGGSLSEDNGVDFNKNTALDKNYLLNNKIPSNNVEEAGSKNYVHYIIQLQGDDISYEATCNLFSKNPKNSIIIQRNMNESAKSYFLSDDGESILELNKYRIPERLKNKEKVKVTFIGHGKDEFNTSEFARLSVDSLSNEISSFLDTIKLDISPKNVEVNLLGANMFSYDFNVEETYPGKLLLSIMDKITSTLPDVNKNSITIGANQYEVRINSEGRKELLAHSGKWINKEEAIMSDLSSKEYIFFDSIDNKLKAKSKNIPGLASISEDIKTLLLDASVSPDTKFILNNLKLNIESSIGDYIYYEKLEPVKNIIHNSIDDLIDEFNLLENVSDELYELKKLNNLDEKYLISFEDISKNNSTYSVRFINKSNGESVYVETEKEIFSKYSEHITKEISTIKNSIITDVNGNLLDNIQLDHTSQVNTLNAAFFIQSLIDYSSNKDVLNDLSTSVKVQLYAQLFSTGLNTIYDSIQLVNLISNAVNDTINVLPTITEGIPIVSTILDGINLGAAIKELLDEHDPLLKKELEAKVGVLAINMSLSIAATVASIVGIGAEVTIFLLPIAGISAGIPSLVNNELILHDKATSVVNYFNHLSESKKYGPLKTEDDKILVPIDDLVISEIDFNNNSIKLGTCNILAMEGGSGHTVTGNIDHFFSSPSISSHIPSLSIYSAIGIETENLDFSKKIMMLPNAPSRVFWWETGAVPGLRSLENDGTRLLDSIRDLYPGKFYWRFYAFFDYAITTLKPVYENTNIKIKLDKDTRNFIMPTITTNEIRNKLSYSFDGAGGTYSLLLSSYPISTNINLSKDDLWIFNIDNEVREISIENGTIKKGKLIKDVLSKIDINKNKLIIGNQTIDFSGDIDNKDRYIFLTCELDDKISLIIEINLVAKSYSLLLSGDKNYLISNLSNTIEKINTLGLDSKNIAYNYTDESNNKYFGAISKTSQKSIIHYKKDSKNILEFYNDSTLEFNSKDFIAEDINVFMKDDINTITGKYYVDNNTDKSIDFSISLVSKNQVKVNGLYLNESVYSSYLDFVKNSDGHHNTSNFMNLFLDNISFWKLFGFENINFVIDKYFTLVGKTNLGYVEFICDNNKNIDIYFGEWKTSSSKSTIFSGNGRNVVVEPIYNPDTGEDISTSLDFSYEPLYGIDRYINKVLIAPDLYTSLININTNYYSNEYYPEIIVLNPNTFHKKVNINLDSSSFEYKWSTEGSDFILVRYLEESNKKILQKIRIKGILSNTQSFNKMSIDFKDIKKLSLGYIMSNFKSFNSENELDRDHLGFKIIDNKTYYYDEDSKLVKGLININNSLFYFDPIEFNLVTGWQTINGKKYYFDINTGAALTSYKIINGKHFYFNNDGVMQLGVFKGPDGFEYFAPANTQNNNIEGQAIVYQSKFLTLNGKKYYFDNDSKAVTGWRIINNEKYYFNPNNAIAAVGLQVIDNNKYYFNPDTAIISKGWQTVNGSRYYFDTDTAIAFNGYKTIDGKHFYFDSDCVVKIGVFSTSNGFEYFAPANTYNNNIEGQAIVYQSKFLTLNGKKYYFDDNSKAVTGWQTIDSKKYYFNTNTAEAATGWQTIDGKKYYFNTNTAEAATGWQTIDGKKYYFNTNTSIASTGYTSINGKHFYFNTDGIMQIGVFKGPNGFEYFAPANTDANNIEGQAILYQNEFLTLNGKKYYFGSDSKAVTGWRIINNKKYYFNPNNAIAAIHLCTINNDKYYFSYDGILQNGYITIERNNFYFDANNESKMVTGVFKGPNGFEYFAPANTHNNNIEGQAIVYQNKFLTLNGKKYYFDNDSKAVTGWQTIDGKKYYFNLNTAEAATGWQTIDGKKYYFNLNTAEAATGWQTIDGKKYYFNTNTFIASTGYTSINGKHFYFNTDGIMQIGVFKGPNGFEYFAPANTHNNNIEGQAILYQNKFLTLNGKKYYFGSDSKAVTGLRTIDGKKYYFNTNTAVAVTGWQTINGKKYYFNTNTSIASTGYTIISGKHFYFNTDGIMQIGVFKGPDGFEYFAPANTDANNIEGQAIRYQNRFLYLHDNIYYFGNNSKAATGWVTIDGNRYYFEPNTAMGANGYKTIDNKNFYFRNGLPQIGVFKGSNGFEYFAPANTDANNIEGQAIRYQNRFLHLLGKIYYFGNNSKAVTGWQTINGKVYYFMPDTAMAAAGGLFEIDGVIYFFGVDGVKAPGIYG

SEQ ID NO: 711 - protein, 2709 aa, Artificial Sequence
  Synthetic amino acid sequence
SLISKEELIKLAYSIRPRENEYKTILTNLDEYNKLTTNNNENKYLQLKKLNESIDVFMNKYKTSSRNRALSNLKKDILKEVILIKNSNTSPVEKNLHFVWIGGEVSDIALEYIKQWADINAEYNIKLWYDSEAFLVNTLKKAIVESSTTEALQLLEEEIQNPQFDNMKFYKKRMEFIYDRQKRFINYYKSQINKPTVPTIDDIIKSHLVSEYNRDETVLESYRTNSLRKINSNHGIDIRANSLFTEQELLNIYSQELLNRGNLAAASDIVRLLALKNFGGVYLAVAMLPGIHSDLFKTISRPSSIGLDRWEMIKLEAIMKYKKYINNYTSENFDKLDQQLKDNFKLIIESKSEKSEIFSKLENLNVSDLEIKIAFALGSVINQALISKQGSYLTNLVIEQVKNRYQFLNQHLNPAIESDNNFTDTTKIFHDSLFNSATAENSMFLTKIAPYLQVGFMPEARSTISLSGPGAYASAYYDFINLQENTIEKTLKASDLIEFKFPENNLSQLTEQEINSLWSFDQASAKYQFEKYVRDYTGGSLSEDNGVDFNKNTALDKNYLLNNKIPSNNVEEAGSKNYVHYIIQLQGDDISYEATCNLFSKNPKNSIIIQRNMNESAKSYFLSDDGESILELNKYRIPERLKNKEKVKVTFIGHGKDEFNTSEFARLSVDSLSNEISSFLDTIKLDISPKNVEVNLLGANMFSYDFNVEETYPGKLLLSIMDKITSTLPDVNKNSITIGANQYEVRINSEGRKELLAHSGKWINKEEAIMSDLSSKEYIFFDSIDNKLKAKSKNIPGLASISEDIKTLLLDASVSPDTKFILNNLKLNIESSIGDYIYYEKLEPVKNIIHNSIDDLIDEFNLLENVSDELYELKKLNNLDEKYLISFEDISKNNSTYSVRFINKSNGESVYVETEKEIFSKYSEHITKEISTIKNSIITDVNGNLLDNIQLDHTSQVNTLNAAFFIQSLIDYSSNKDVLNDLSTSVKVQLYAQLFSTGLNTIYDSIQLVNLISNAVNDTINVLPTITEGIPIVSTILDGINLGAAIKELLDEHDPLLKKELEAKVGVLAINMSLSIAATVASIVGIGAEVTIFLLPIAGISAGIPSLVNNELILHDKATSVVNYFNHLSESKKYGPLKTEDDKILVPIDDLVISEIDFNNNSIKLGTCNILAMEGGSGHTVTGNIDHFFSSPSISSHIPSLSIYSAIGIETENLDFSKKIMMLPNAPSRVFWWETGAVPGLRSLENDGTRLLDSIRDLYPGKFYWRFYAFFDYAITTLKPVYEDTNIKIKLDKDTRNFIMPTITTNEIRNKLSYSFDGAGGTYSLLLSSYPISTNINLSKDDLWIFNIDNEVREISIENGTIKKGKLIKDVLSKIDINKNKLIIGNQTIDFSGDIDNKDRYIFLTCELDDKISLIIEINLVAKSYSLLLSGDKNYLISNLSNTIEKINTLGLDSKNIAYNYTDESNNKYFGAISKTSQKSIIHYKKDSKNILEFYNDSTLEFNSKDFIAEDINVFMKDDINTITGKYYVDNNTDKSIDFSISLVSKNQVKVNGLYLNESVYSSYLDFVKNSDGHHNTSNFMNLFLDNISFWKLFGFENINFVIDKYFTLVGKTNLGYVEFICDNNKNIDIYFGEWKTSSSKSTIFSGNGRNVVVEPIYNPDTGEDISTSLDFSYEPLYGIDRYINKVLIAPDLYTSLININTNYYSNEYYPEIIVLNPNTFHKKVNINLDSSSFEYKWSTEGSDFILVRYLEESNKKILQKIRIKGILSNTQSFNKMSIDFKDIKKLSLGYIMSNFKSFNSENELDRDHLGFKIIDNKTYYYDEDSKLVKGLININNSLFYFDPIEFNLVTGWQTINGKKYYFDINTGAALTSYKIINGKHFYFNNDGVMQLGVFKGPDGFEYFAPANTQNNNIEGQAIVYQSKFLTLNGKKYYFDNNSKAVTGWRIINNEKYYFNPNNAIAAVGLQVIDNNKYYFNPDTAIISKGWQTVNGSRYYFDTDTAIAFNGYKTIDGKHFYFDSDCVVKIGVFSTSNGFEYFAPANTYNNNIEGQAIVYQSKFLTLNGKKYYFDNNSKAVTGLQTIDSKKYYFNTNTAEAATGWQTIDGKKYYFNTNTAEAATGWQTIDGKKYYFNTNTAIASTGYTIINGKHFYFNTDGIMQIGVFKGPNGFEYFAPANTDANNIEGQAILYQNEFLTLNGKKYYFGSDSKAVTGWRIINNKKYYFNPNNAIAAIHLCTINNDKYYFSYDGILQNGYITIERNNFYFDANNESKMVTGVFKGPNGFEYFAPANTHNNNIEGQAIVYQNKFLTLNGKKYYFDNDSKAVTGWQTIDGKKYYFNLNTAEAATGWQTIDGKKYYFNLNTAEAATGWQTIDGKKYYFNTNTFIASTGYTSINGKHFYFNTDGIMQIGVFKGPNGFEYFAPANTDANNIEGQAILYQNKFLTLNGKKYYFGSDSKAVTGLRTIDGKKYYFNTNTAVAVTGWQTINGKKYYFNTNTSIASTGYTIISGKHFYFNTDGIMQIGVFKGPDGFEYFAPANTDANNIEGQAIRYQNRFLYLHDNIYYFGNNSKAATGWVTIDGNRYYFEPNTAMGANGYKTIDNKNFYFRNGLPQIGVFKGSNGFEYFAPANTDANNIEGQAIRYQNRFLHLLGKIYYFGNNSKAVTGWQTINGKVYYFMPDTAMAAAGGLFEIDGVIYFFGVDGVKAPGIYG

SEQ ID NO: 712 - protein, 2365 aa, Artificial Sequence
  Synthetic amino acid sequence
SLVNRKQLEKMANVRFRVQEDEYVAILDALEEYHNMSENTVVEKYLKLKDINSLTDIYIDTYKKSGRNKALKKFKEYLVTEVLELKNNNLTPVEKNLHFVWIGGQINDTAINYINQWKDVNSDYNVNVFYDSNAFLINTLKKTIVESATNDTLESFRENLNDPRFDYNKFYRKRMEIIYDKQKNFINYYKTQREENPDLIIDDIVKIYLSNEYSKDIDELNSYIEESLNKVTENSGNDVRNFEEFKGGESFKLYEQELVERWNLAAASDILRISALKEVGGVYLAVAMLPGIQPDLFESIEKPSSVTVDFWEMVKLEAIMKYKEYIPGYTSEHFDMLDEEVQSSFESVLASKSDKSEIFSSLGDMEASPLEVKIAFNSKGIINQGLISVKDSYCSNLIVKQIENRYKILNNSLNPAISEDNDFNTTTNAFIDSIMAEANADNGRFMMELGKYLRVGFFPDVKTTINLSGPEAYAAAYQDLLMFKEGSMNIHLIEADLRNFEISKTNISQSTEQEMASLWSFDDARAKAQFEEYKKNYFEGSLGEDDNLDFSQNTVVDKEYLLEKISSLARSSERGYIHYIVQLQGDKISYEAACNLFAKTPYDSVLFQKNIEDSEIAYYYNPGDGEIQEIDKYKIPSIISDRPKIKLTFIGHGKDEFNTDIFAGLDVDSLSTEIETAIDLAKEDISPKSIEINLLGANMFSYSVNVEETYPGKLLLRVKDKVSELMPSISQDSIIVSANQYEVRINSEGRRELLDHSGEWINKEESIIKDISSKEYISFNPKENKIIVKSKNLPELSTLLQEIRNNSNSSDIELEEKVMLAECEINVISNIDTQVVEGRIEEAKSLTSDSINYIKNEFKLIESISDALYDLKQQNELEESHFISFEDILETDEGFSIRFIDKETGESIFVETEKAIFSEYANHITEEISKIKGTIFDTVNGKLVKKVNLDATHEVNTLNAAFFIQSLIEYNSSKESLSNLSVAMKVQVYAQLFSTGLNTITDAAKVVELVSTALDETIDLLPTLSEGLPVIATIIDGVSLGAAIKELSETSDPLLRQEIEAKIGIMAVNLTAATTAIITSSLGIASGFSILLVPLAGISAGIPSLVNNELILRDKATKVVDYFSHISLAESEGAFTSLDDKIMMPQDDLVISEIDFNNNSITLGKCEIWRMEGGSGHTVTDDIDHFFSAPSITYREPHLSIYDVLEVQKEELDLSKDLMVLPNAPNRVFAWETGWTPGLRSLENDGTKLLDRIRDNYEGEFYWRYFAFIADALITTLKPRYEDTNIRINLDSNTRSFIVPVITTEYIREKLSYSFYGSGGTYALSLSQYNMNINIELNENDTWVIDVDNVVRDVTIESDKIKKGDLIENILSKLSIEDNKIILDNHEINFSGTLNGGNGFVSLTFSILEGINAVIEVDLLSKSYKVLISGELKTLMANSNSVQQKIDYIGLNSELQKNIPYSFMDDKGKENGFINCSTKEGLFVSELSDVVLISKVYMDNSKPLFGYCSNDLKDVKVITKDDVIILTGYYLKDDIKISLSFTIQDENTIKLNGVYLDENGVAEILKFMNKKGSTNTSDSLMSFLESMNIKSIFINSLQSNTKLILDTNFIISGTTSIGQFEFICDKDNNIQPYFIKFNTLETKYTLYVGNRQNMIVEPNYDLDDSGDISSTVINFSQKYLYGIDSCVNKVIISPNIYTDEINITPIYEANNTYPEVIVLDTNYISEKINININDLSIRYVWSNDGSDFILMSTDEENKVSQVKIRFTNVFKGNTISDKISFNFSDKQDVSINKVISTFTPSYYVEGLLNYDLGLISLYNEKFYINNFGMMVSGLVYINDSLYYFKPPIKNLITGFTTIGDDKYYFNPDNGGAASVGETIIDGKNYYFSQNGVLQTGVFSTEDGFKYFAPADTLDENLEGEAIDFTGKLTIDENVYYFGDNYRAAIEWQTLDDEVYYFSTDTGRAFKGLNQIGDDKFYFNSDGIMQKGFVNINDKTFYFDDSGVMKSGYTEIDGKYFYFAENGEMQIGVFNTADGFKYFAHHDEDLGNEEGEALSYSGILNFNNKIYYFDDSFTAVVGWKDLEDGSKYYFDEDTAEAYIGISIINDGKYYFNDSGIMQIGFVTINNEVFYFSDSGIVESGMQNIDDNYFYIDENGLVQIGVFDTSDGYKYFAPANTVNDNIYGQAVEYSGLVRVGEDVYYFGETYTIETGWIYDMENESDKYYFDPETKKAYKGINVIDDIKYYFDENGIMRTGLITFEDNHYYFNEDGIMQYGYLNIEDKTFYFSEDGIMQIGVFNTPDGFKYFAHQNTLDENFEGESINYTGWLDLDEKRYYFTDEYIAATGSVIIDGEEYYFDPDTAQLVISE

SEQ ID NO: 713 - protein, 2365 aa, Artificial Sequence
  Synthetic amino acid sequence
SLVNRKQLEKMANVRFRTQEDEYVAILDALEEYHNMSENTVVEKYLKLKDINSLTDIYIDTYKKSGRNKALKKFKEYLVTEVLELKNNNLTPVEKNLHFVWIGGQINDTAINYINQWKDVNSDYNVNVFYDSNAFLINTLKKTVVESAINDTLESFRENLNDPRFDYNKFFRKRMEIIYDKQKNFINYYKAQREENPELIIDDIVKTYLSNEYSKEIDELNTYIEESLNKITQNSGNDVRNFEEFKNGESFNLYEQELVERWNLAAASDILRISALKEIGGMYLAVAMLPGIQPDLFESIEKPSSVTVDFWEMTKLEAIMKYKEYIPEYTSEHFDMLDEEVQSSFESVLASKSDKSEIFSSLGDMEASPLEVKIAFNSKGIINQGLISVKDSYCSNLIVKQIENRYKILNNSLNPAISEDNDFNTTTNTFIDSIMAEANADNGRFMMELGKYLRVGFFPDVKTTINLSGPEAYAAAYQDLLMFKEGSMNIHLIEADLRNFEISKTNISQSTEQEMASLWSFDDARAKAQFEEYKRNYFEGSLGEDDNLDFSQNIVVDKEYLLEKISSLARSSERGYIHYIVQLQGDKISYEAACNLFAKTPYDSVLFQKNIEDSEIAYYYNPGDGEIQEIDKYKIPSIISDRPKIKLTFIGHGKDEFNTDIFAGFDVDSLSTEIEAAIDLAKEDISPKSIEINLLGANMFSYSINVEETYPGKLLLKVKDKISELMPSISQDSIIVSANQYEVRINSEGRRELLDHSGEWINKEESIIKDISSKEYISFNPKENKITVKSKNLPELSTLLQEIRNNSNSSDIELEEKVMLTECEINVISNIDTQIVEERIEEAKNLTSDSINYIKDEFKLIESISDALCDLKQQNELEDSHFISFEDISETDEGFSIRFINKETGESIFVETEKTIFSEYANHITEEISKIKGTIFDTVNGKLVKKVNLDTTHEVNTLNAAFFIQSLIEYNSSKESLSNLSVAMKVQVYAQLFSTGLNTITDAAKVVELVSTALDETIDLLPTLSEGLPIIATIIDGVSLGAAIKELSETSDPLLRQEIEAKIGIMAVNLTTATTAIITSSLGVASGFSILLVPLAGISAGIPSLVNNELVLRDKATKVVDYFKHVSLVETEGVFTLLDDKIMMPQDDLVISEIDFNNNSIVLGKCEIWRMEGGSGHTVTDDIDHFFSAPSITYREPHLSIYDVLEVQKEELDLSKDLMVLPNAPNRVFAWETGWTPGLRSLENDGTKLLDRIRDNYEGEFYWRYFAFIADALITTLKPRYEDTNIRINLDSNTRSFIVPIITTEYIREKLSYSFYGSGGTYALSLSQYNMGINIELSESDVWIIDVDNVVRDVTIESDKIKKGDLIEGILSTLSIEENKIILNSHEINFSGEVNGSNGFVSLTFSILEGINAIIEVDLLSKSYKLLISGELKILMLNSNHIQQKIDYIGFNSELQKNIPYSFVDSEGKENGFINGSTKEGLFVSELPDVVLISKVYMDDSKPSFGYYSNNLKDVKVITKDNVNILTGYYLKDDIKISLSLTLQDEKTIKLNSVHLDESGVAEILKFMNRKGNTNTSDSLMSFLESMNIKSIFVNFLQSNIKFILDANFIISGTTSIGQFEFICDENDNIQPYFIKFNTLETNYTLYVGNRQNMIVEPNYDLDDSGDISSTVINFSQKYLYGIDSCVNKVVISPNIYTDEINITPVYETNNTYPEVIVLDANYINEKINVNINDLSIRYVWSNDGNDFILMSTSEENKVSQVKIRFVNVFKDKTLANKLSFNFSDKQDVPVSEIILSFTPSYYEDGLIGYDLGLVSLYNEKFYINNFGMMVSGLIYINDSLYYFKPPVNNLITGFVTVGDDKYYFNPINGGAASIGETIIDDKNYYFNQSGVLQTGVFSTEDGFKYFAPANTLDENLEGEAIDFTGKLIIDENIYYFDDNYRGAVEWKELDGEMHYFSPETGKAFKGLNQIGDYKYYFNSDGVMQKGFVSINDNKHYFDDSGVMKVGYTEIDGKHFYFAENGEMQIGVFNTEDGFKYFAHHNEDLGNEEGEEISYSGILNFNNKIYYFDDSFTAVVGWKDLEDGSKYYFDEDTAEAYIGLSLINDGQYYFNDDGIMQVGFVTINDKVFYFSDSGIIESGVQNIDDNYFYIDDNGIVQIGVFDTSDGYKYFAPANTVNDNIYGQAVEYSGLVRVGEDVYYFGETYTIETGWIYDMENESDKYYFNPETKKACKGINLIDDIKYYFDEKGIMRTGLISFENNNYYFNENGEMQFGYINIEDKMFYFGEDGVMQIGVFNTPDGFKYFAHQNTLDENFEGESINYTGWLDLDEKRYYFTDEYIAATGSVIIDGEEYYFDPDTAQLVISE

SEQ ID NO: 714 - protein, 2365 aa, Artificial Sequence; identical to SEQ ID NO: 712
  Synthetic amino acid sequence

SEQ ID NO: 715 - protein, 2365 aa, Artificial Sequence; identical to SEQ ID NO: 713
  Synthetic amino acid sequence

SEQ ID NO: 716 - protein, 2365 aa, Artificial Sequence
  Synthetic amino acid sequence
SLVNRKQLEKMANVRFRTQEDEYVAILDALEEYHNMSENTVVEKYLKLKDINSLTDIYIDTYKKSGRNKALKKFKEYLVTEVLELKNNNLTPVEKNLHFVWIGGQINDTAINYINQWKDVNSDYNVNVFYDSNAFLINTLKKTVVESAINDTLESFRENLNDPRFDYNKFFRKRMEIIYDKQKNFINYYKAQREENPELIIDDIVKTYLSNEYSKEIDELNTYIEESLNKITQNSGNDVRNFEEFKNGESFNLYEQELVERWNLAAASDILRISALKEIGGMYLAVAMLPGIQPDLFESIEKPSSVTVDFWEMTKLEAIMKYKEYIPEYTSEHFDMLDEEVQSSFESVLASKSDKSEIFSSLGDMEASPLEVKIAFNSKGIINQGLISVKDSYCSNLIVKQIENRYKILNNSLNPAISEDNDFNTTTNTFIDSIMAEANADNGRFMMELGKYLRVGFFPDVKTTINLSGPEAYAAAYQDLLMFKEGSMNIHLIEADLRNFEISKTNISQSTEQEMASLWSFDDARAKAQFEEYKRNYFEGSLGEDDNLDFSQNIVVDKEYLLEKISSLARSSERGYIHYIVQLQGDKISYEAACNLFAKTPYDSVLFQKNIEDSEIAYYYNPGDGEIQEIDKYKIPSIISDRPKIKLTFIGHGKDEFNTDIFAGFDVDSLSTEIEAAIDLAKEDISPKSIEINLLGANMFSYSINVEETYPGKLLLKVKDKISELMPSISQDSIIVSANQYEVRINSEGRRELLDHSGEWINKEESIIKDISSKEYISFNPKENKITVKSKNLPELSTLLQEIRNNSNSSDIELEEKVMLTECEINVISNIDTQIVEERIEEAKNLTSDSINYIKDEFKLIESISDALCDLKQQNELEDSHFISFEDISETDEGFSIRFINKETGESIFVETEKTIFSEYANHITEEISKIKGTIFDTVNGKLVKKVNLDTTHEVNTLNAAFFIQSLIEYNSSKESLSNLSVAMKVQVYAQLFSTGLNTITDAAKVVELVSTALDETIDLLPTLSEGLPIIATIIDGVSLGAAIKELSETSDPLLRQEIEAKIGIMAVNLTTATTAIITSSLGIASGFSILLVPLAGISAGIPSLVNNELVLRDKATKVVDYFKHVSLVETEGVFTLLDDKIMMPQDDLVISEIDFNNNSIVLGKCEIWRMEGGSGHTVTDDIDHFFSAPSITYREPHLSIYDVLEVQKEELDLSKDLMVLPNAPNRVFAWETGWTPGLRSLENDGTKLLDRIRDNYEGEFYWRYFAFIADALITTLKPRYEDTNIRINLDSNTRSFIVPIITTEYIREKLSYSFYGSGGTYALSLSQYNMGINIELSESDVWIIDVDNVVRDVTIESDKIKKGDLIEGILSTLSIEENKIILNSHEINFSGEVNGSNGFVSLTFSILEGINAIIEVDLLSKSYKLLISGELKILMLNSNHIQQKIDYIGFNSELQKNIPYRFVDSEGKENGFINGSTKEGLFVSELPDVVLISKVYMDDSKPSFGYYSNNLKDVKVITKDNVNILTGYYLKDDIKISLSLTLQDEKTIKLNSVHLDESGVAEILKFMNRKGNTNTSDSLMSFLESMNIKSIFVNFLQSNIKFILDANFIISGTTSIGQFEFICDENDNIQPYFIKFNTLETNYTLYVGNRQNMIVEPNYDLDDSGDISSTVINFSQKYLYGIDSCVNKVVISPNIYTDEINITPVYETNNTYPEVIVLDANYINEKINVNINDLSIRYVWSNDGNDFILMSTSEENKVSQVKIRFVNVFKDKTLANKLSFNFSDKQDVPVSEIILSFTPSYYEDGLIGYDLGLVSLYNEKFYINNFGMMVSGLIYINDSLYYFKPPVNNLITGFVTVGDDKYYFNPINGGAASIGETIIDDKNYYFNQSGVLQTGVFSTEDGFKYFAPANTLDENLEGEAIDFTGKLIIDENIYYFDDNYRGAVEWKELDGEMHYFSPETGKAFKGLNQIGDDKYYFNSDGVMQKGFVSINDNKHYFDDSGVMKVGYTEIDGKHFYFAENGEMQIGVFNTEDGFKYFAHHNEDLGNEEGEEISYSGILNFNNKIYYFDDSFTAVVGWKDLEDGSKYYFDEDTAEAYIGLSLINDGQYYFNDDGIMQVGFVTINDKVFYFSDSGIIESGVQNIDDNYFYIDDNGIVQIGVFDTSDGYKYFAPANTVNDNIYGQAVEYSGLVRVGEDVYYFGETYTIETGWIYDMENESDKYYFNPETKKACKGINLIDDIKYYFDEKGIMRTGLISFENNNYYFNENGEMQFGYINIEDKMFYFGEDGVMQIGVFNTPDGFKYFAHQNTLDENFEGESINYTGWLDLDEKRYYFTDEYIAATGSVIIDGEEYYFDPDTAQLVISE

SEQ ID NO: 717 - protein, 2365 aa, Artificial Sequence
  Synthetic amino acid sequence
SLVNRKQLEKMANVRFRTQEDEYVAILDALEEYHNMSENTVVEKYLKLKDINSLTDIYIDTYKKSGRNKALKKFKEYLVTEVLELKNNNLTPVEKNLHFVWIGGQINDTAINYINQWKDVNSDYNVNVFYDSNAFLINTLKKTVVESAINDTLESFRENLNDPRFDYNKFFRKRMEIIYDKQKNFINYYKAQREENPELIIDDIVKTYLSNEYSKEIDELNTYIEESLNKITQNSGNDVRNFEEFKNGESFNLYEQELVERWNLAAASDILRISALKEIGGMYLAVAMLPGIQPDLFESIEKPSSVTVDFWEMTKLEAIMKYKEYIPEYTSEHFDMLDEEVQSSFESVLASKSDKSEIFSSLGDMEASPLEVKIAFNSKGIINQGLISVKDSYCSNLIVKQIENRYKILNNSLNPAISEDNDFNTTTNTFIDSIMAEANADNGRFMMELGKYLRVGFFPDVKTTINLSGPEAYAAAYQDLLMFKEGSMNIHLIEADLRNFEISKTNISQSTEQEMASLWSFDDARAKAQFEEYKRNYFEGSLGEDDNLDFSQNIVVDKEYLLEKISSLARSSERGYIHYIVQLQGDKISYEAACNLFAKTPYDSVLFQKNIEDSEIAYYYNPGDGEIQEIDKYKIPSIISDRPKIKLTFIGHGKDEFNTDIFAGFDVDSLSTEIEAAIDLAKEDISPKSIEINLLGANMFSYSINVEETYPGKLLLKVKDKISELMPSISQDSIIVSANQYEVRINSEGRRELLDHSGEWINKEESIIKDISSKEYISFNPKENKITVKSKNLPELSTLLQEIRNNSNSSDIELEEKVMLTECEINVISNIDTQIVEERIEEAKNLTSDSINYIKDEFKLIESISDALCDLKQQNELEDSHFISFEDISETDEGFSIRFINKETGESIFVETEKTIFSEYANHITEEISKIKGTIFDTVNGKLVKKVNLDTTHEVNTLNAAFFIQSLIEYNSSKESLSNLSVAMKVQVYAQLFSTGLNTITDAAKVVELVSTALDETIDLLPTLSEGLPIIATIIDGVSLGAAIKELSETSDPLLRQEIEAKIGIMAVNLTTATTAIITSSLGIASGFSILLVPLAGISAGIPSLVNNELVLRDKATKVVDYFKHVSLVETEGVFTLLDDKIMMPQDDLVISEIDFNNNSIVLGKCEIWRMEGGSGHTVTDDIDHFFSAPSITYREPHLSIYDVLEVQKEELDLSKDLMVLPNAPNRVFAWETGWTPGLRSLENDGTKLLDRIRDNYEGEFYWRYFAFIADALITTLKPRYEDTNIRINLDSNTRSFIVPIITTEYIREKLSYSFYGSGGTYALSLSQYNMGINIELSESDVWIIDVDNVVRDVTIESDKIKKGDLIEGILSTLSIEENKIILNSHEINFSGEVNGSNGFVSLTFSILEGINAIIEVDLLSKSYKLLISGELKILMLNSNHIQQKIDYIGFNSELQKNIPYSFVDSEGKENGFINGSTKEGLFVSELPDVVLISKVYMDDSKPSFGYYSNNLKDVKVITKDNVNILTGYYLKDDIKISLSLTLQDEKTIKLNSVHLDESGVAEILKFMNRKGNTNTSDSLMSFLESMNIKSIFVNFLQSNIKFILDANFIISGTTSIGQFEFICDENDNIQPYFIKFNTLETNYTLYVGNRQNMIVEPNYDLDDSGDISSTVINFSQKYLYGIDSCVNKVVISPNIYTDEINITPVYETNNTYPEVIVLDANYINEKINVNINDLSIRYVWSNDGNDFILMSTSEENKVSQVKIRFVNVFKDKTLANKLSFNFSDKQDVPVSEIILSFTPSYYEDGLIGYDLGLVSLYNEKFYINNFGMMVSGLIYINDSLYYFKPPVNNLITGFVTVGDDKYYFNPINGGAASIGETIIDDKNYYFNQSGVLQTGVFSTEDGFKYFAPANTLDENLEGEAIDFTGKLIIDENIYYFDDNYRGAVEWKELDGEMHYFSPETGKAFKGLNQIGDDKYYFNSDGVMQKGFVSINDNKHYFDDSGVMKVGYTEIDGKHFYFAENGEMQIGVFNTEDGFKYFAHHNEDLGNEEGEEISYSGILNFNNKIYYFDDSFTAVVGWKDLEDGSKYYFDEDTAEAYIGLSLINDGQYYFNDDGIMQVGFVTINDKVFYFSDSGIIESGVQNIDDNYFYIDDNGIVQIGVFDTSDGYKYFAPANTVNDNIYGQAVEYSGLVRVGEDVYYFGETYTIETGWIYDMENESDKYYFNPETKKACKGINLIDDIKYYFDEKGIMRTGLISFENNNYYFNENGEMQFGYINIEDKMFYFGEDGVMQIGVFNTPDGFKYFAHQNTLDENFEGESINYTGWLDLDEKRYYFTDEYIAATGSVIIDGEEYYFDPDTAQLVISE

SEQ ID NO: 718 - protein, 2365 aa, Artificial Sequence
  Synthetic amino acid sequence
SLVNRKQLEKMANVRFRTQEDEYVAILDALEEYHNMSENTVVEKYLKLKDINSLTDIYIDTYKKSGRNKALKKFKEYLVTEVLELKNNNLTPVEKNLHFVWIGGQINDTAINYINQWKDVNSDYNVNVFYDSNAFLINTLKKTIVESAINDTLESFRENLNNPRFDYNKFFRKRMEIIYDKQKNFINYYKAQREENPELIIDDIVKIYLSNEYSKEIDELNTYIEESLNKIKQNSGNDVRNFEEFKNGESFKLYEQELVERWNLAAASDILRISALKEIGGMYLAVAMLPGIQPDLFESIEKPSSVTVDFWEMTKLEAIMKYKEYIPGYTSEHFDMLDEEVQSSFESALASKSDKSEIFSSLGDMEASPLEVKIAFNSKGIINQGLISVKDSYCSNLIVKQIENRYKILNNSLNPAISEDNDFNTTTNTFIDSIMAEANADNGRFMMELGKYLRVGFFPDVKTTVNLSGPEAYAAAYQDLLMFKEGSMNIHLIEADLRNFEISKTNISQSTEQEMASLWTFDDARAKVQFEEYKRNYFEGSLGEDDNLDFSQNIVVDKEYLLEKISSLARSSERGYIHYIVQLQGDKISYEAACNLFAKTPYDSILFQKNIENSEVAYYYNPGDGEIQEIDKYRIPSIISDRPKIKLTFIGHGKDEFNTDIFAGLDVDSLSTEIETAIDLAKEDISSKSIEINLLGANMFSYSINVEETYPGKLLLKVKDKISELMPSISQDSIIVSANQYEVRINNEGRRELLDHSGEWINKEESIIKDISSKEYISFNPKENKITVKSKNLPELSTLLQEIRNNSNLSDIELEEKVMLAECEINVISNIDTQIVEERIEEAKNLTSDSINYIKNEFKLIESISDSLYDLKQQNELDDSHFISFEDISKTEDGFSIRFINKETGESIFVETEKEIFSEYANHIEREISNIKDTIFDTVNGKLVKKVNLDAIHEVNTLNAAFFIQSLIGYSSSKESLSNLSVAMKVQVYAQLFSTGLNTITDAAKVVELVSTALDETIDLLPTLSEGLPVIATIIDGVSLGAAIKELSETSDPLLRQEIEAKIGIMAVNLTAATTAIITSSLGIASGFSILLVPLAGISAGIPSLVNNELVLRDKATKVVDYFKHISLVETEGAFTLLDDKIMIPQDDLVISEIDFNNNSIVLGKCEIWRMEGGSGHTVTNDIDHFFSSPTITYIKPHLSIYDVLEVQKEELDLSKDLMVLPNAPNRVFAWETGWTPGLRSLENEGTKLLDRIRDHYKGEFYWRYFAFIADALITTLKPRYEDTNIRINLDSNNRSFIVPIITTEHIREKLSYSFHGSGGTYALSLSQYNMGINIELSESDVWIIDVDNVVRDVTIDSDKIKKGDLIEGILSTLSIEDNKIILNHHEINFSGDVNGSNGFISLTFSILEGINAIIEVDLLSKSYKLLISGELKILMLNSNHIQQKIDYIGFNSELQKNIPYSFVDSEGKENGFINGSTKEGLFVSELPDVVLISKVYMDDSKPSFGYYSNNLKDVKVITKDNVNILTGYYLKDDIKISLSFTLQDEKTIKLNGVHLDESGVAEILKFMNKKGSTNTSDSLMSFLESVNIKSIFVNFLQSKINFILDANFIISGTTSIGQFEFICDENDNIQPYFIKFNTLETTYTLYVGNRQNMIVEPNYDLDDSGDISSTVINFSQKYLYGIDSCVNKVVISPNIYTDEINITPVYETNNNYPEVIVLDANYINEKINVNINDLSIRYVWSNDGNDFILMSTSEENKVSQVKIRFVNVFKDKTLANKLSFNFSDKQDVPVSEIISAFTPSYYEDGLIGYDLGLVSLYNEKFYINNFGMMVSGLIYINDSLYYFKPPVNNLITGFVTVGDDKYYFNPTNGGAASIGETIINDKNYYFNQSGILQTGVFSTEDGLKYFAPANTLDENLEGEAIDFTGKLIIDENIYYFEDNYRGAVEWKELDGEMYYFSPETGKAFKGLNQIGDDKYYFNSDGIMQKGFVSINDKKYYFDDSGVMKVGYIEIDGKYFYFAENGEMQIGVFNTSDGFKYFAHHNEDLGNEEGEAISYSGILNFNNKIYYFDYSFTAVVGWKDLEDGSKYYFDEDTAEAYVGLSLINDGQYYFNDDGIMQVGFVTINNKVFYFSDSGIIESGVQNIDDNYFYIDEKGIVQIGVFDTSDEYKYFAPANTVNDNIYGQAVDYSGLVRVGEDIYYFGETYTIETGWIYDMENESDKYYFNPETKKACKGINLIDDIKYYFDENGIMRTGLISFENNDYYFNENGEMQFGYINIEDKMFYFGEDGVMQIGVFNTQDGFKYFAHQNTLDENFEGESINYTGWLDLDEKRYYFTDEYIAATGSVIIDGEEYYFDPDTAQLVISE

SEQ ID NO: 719 - protein, 2365 aa, Artificial Sequence; identical to SEQ ID NO: 717
  Synthetic amino acid sequence

SEQ ID NO: 720 - protein, 2365 aa, Artificial Sequence; identical to SEQ ID NO: 718
  Synthetic amino acid sequence

SEQ ID NO: 721 - protein, 2365 aa, Artificial Sequence; identical to SEQ ID NO: 712
  Synthetic amino acid sequence

SEQ ID NO: 722 - protein, 2365 aa, Artificial Sequence
  Synthetic amino acid sequence
SLVNRKQLEKMANVRFRTQEDEYVAILDALEEYHNMSENTVVEKYLKLKDINSLTDIYIDTYKKSGRNKALKKFKEYLVTEVLELKNNNLTPVEKNLHFVWIGGQINDTAINYINQWKDVNSDYNVNVFYDSNAFLINTLKKTVVESAINDTLESFRENLNDPRFDYNKFFRKRMEIIYDKQKNFINYYKAQREENPELIIDDIVKTYLSNEYSKEIDELNTYIEESLNKITQNSGNDVRNFEEFKNGESFNLYEQELVERWNLAAASDILRISALKEIGGMYLAVAMLPGIQPDLFESIEKPSSVTVDFWEMTKLEAIMKYKEYIPEYTSEHFDMLDEEVQSSFESVLASKSDKSEIFSSLGDMEASPLEVKIAFNSKGIINQGLISVKDSYCSNLIVKQIENRYKILNNSLNPAISEDNDFNTTTNTFIDSIMAEANADNGRFMMELGKYLRVGFFPDVKTTINLSGPEAYAAAYQDLLMFKEGSMNIHLIEADLRNFEIFKTNISQSTEQEMASLWSFDDARAKAQFEEYKRNYFEGSLGEDDNLDFSQNIVVDKEYLLEKISSLARSSERGYIHYIVQLQGDKISYEAACNLFAKTPYDSVLFQKNIEDSEIAYYYNPGDGEIQEIDKYKIPSIISDRPKIKLTFIGHGKDEFNTDIFAGFDVDSLSTEIEAAIDLAKEDISPKSIEINLLGANMFSYSINVEETYPGKLLLKVKDKISELMPSISQDSIIVSANQYEVRINSEGRRELLDHSGEWINKEESIIKDISSKEYISFNPKENKITVKSKNLPELSTLLQEIRNNSNSSDIELEEKVMLTECEINVISNIDTQIVEERIEEAKNLTSDSINYIKDEFKLIESISDALCDLKQQNELEDSHFISFEDISETDEGFSIRFINKETGESIFVETEKTIFSEYANHITEEISKIKGTIFDTVNGKLVKKVNLDTTHEVNTLNAAFFIQSLIEYNSSKESLSNLSVAMKVQVYAQLFSTGLNTITDAAKVVELVSTALDETIDLLPTLSEGLPIIATIIDGVSLGAAIKELSETSDPLLRQEIEAKIGIMAVNLTTATTAIITSSLGIASGFSILLVPLAGISAGIPSLVNNELVLRDKATKVVDYFKHVSLVETEGVFTLLDDKIMMPQDDLVISEIDFNNNSIVLGKCEIWRMEGGSGHTVTDDIDHFFSAPSITYREPHLSIYDVLEVQKEELDLSKDLMVLPNAPNRVFAWETGWTPGLRSLENDGTKLLDRIRDNYEGEFYWRYFAFIADALITTLKPRYEDTNIRINLDSNTRSFIVPIITTEYIREKLSYSFYGSGGTYALSLSQYNMGINIELSESDVWIIDVDNVVRDVTIESDKIKKGDLIEGILSTLSIEENKIILNSHEINFSGEVNGSNGFVSLTFSILEGINAIIEVDLLSKSYKLLISGELKILMLNSNHIQQKIDYIGFNSELQKNIPYSFVDSEGKENGFINGSTKEGLFVSELPDVVLISKVYMDDSKPSFGYYSNNLKDVKVITKDNVNILTDYYLKDDIKISLSLTLQDEKTIKLNSVHLDESGVAEILKFMNRKGNTNTSDSLMSFLESMNIKSIFVNFLQSNIKFILDANFIISGTTSIGQFEFICDENDNIQPYFIKFNTLETNYTLYVGNRQNMIVEPNYDLDDSGDISSTVINFSQKYLYGIDSCVNKVVISPNIYTDEINITPVYETNNTYPEVIVLDANYINEKINVNINDLSIRYVWSNDGNDFILMSTSEENKVSQVKIRFVNVFKDKTLANKLSFNFSDKQDVPVSEIILSFTPSYYEDGLIGYDLGLVSLYNEKFYINNFGMMVSGLIYINDSLYYFKPPVNNLITGFVTVGDDKYYFNPINGGAASIGETIIDDKNYYFNQSGVLQTGVFSTEDGFKYFAPANTLDENLEGEAIDFTGKLIIDENIYYFDDNYRGAVEWKELDGEMHYFSPETGKAFKGLNQIGDYKYYFNSDGVMQKGFVSINDNKHYFDDSGVMKVGYTEIDGKHFYFAENGEMQIGVFNTEDGFKYFAHHNEDLGNEEGEEISYSGILNFNNKIYYFDDSFTAVVGWKDLEDGSKYYFDEDTAEAYIGLSLINDGQYYFNDDGIMQVGFVTINDKVFYFSDSGIIESGVQNIDDNYFYIDDNGIVQIGVFDTSDGYKYFAPANTVNDNIYGQAVEYSGLVRVGEDVYYFGETYTIETGWIYDMENESDKYYFNPETKKACKGINLIDDIKYYFDEKGIMRTGLISFENNNYYFNENGEMQFGYINIEDKMFYFGEDGVMQIGVFNTPDGFKYFAHQNTLDENFEGESINYTGWLDLDEKRYYFTDEYIAATGSVIIDGEEYYFDPDTAQLVISE

SEQ ID NO: 723 - protein, 2366 aa, Artificial Sequence
  Synthetic amino acid sequence
SLVNRKQLEKMANVRFRVQEDEYVAILDALEEYHNMSENTVVEKYLKLKDINSLTDTYIDTYKKSGRNKALKKFKEYLVIEILELKNSNLTPVEKNLHFIWIGGQINDTAINYINQWKDVNSDYNVNVFYDSNAFLINTLKKTIIESASNDTLESFRENLNDPEFNHTAFFRKRMQIIYDKQQNFINYYKAQKEENPDLIIDDIVKTYLSNEYSKDIDELNAYIEESLNKVTENSGNDVRNFEEFKTGEVFNLYEQELVERWNLAGASDILRVAILKNIGGVYLAVAMLPGIHPDLFKDINKPDSVKTAVDWEEMQLEAIMKHKEYIPEYTSKHFDTLDEEVQSSFESVLASKSDKSEIFLPLGDIEVSPLEVKIAFAKGSIINQALISAKDSYCSDLLIKQIQNRYKILNDTLGPIISQGNDFNTTMNNFGESLGAIANEENISFIAKIGSYLRVGFYPEANTTITLSGPTIYAGAYKDLLTFKEMSIDTSILSSELRNFEFPKVNISQATEQEKNSLWQFNEERAKIQFEEYKKNYFEGALGEDDNLDFSQNTVTDKEYLLEKISSSTKSSERGYVHYIVQLQGDKISYEAACNLFAKNPYDSILFQKNIEDSEVAYYYNPTDSEIQEIDKYRIPDRISDRPKIKLTFIGHGKAEFNTDIFAGLDVDSLSSEIETAIGLAKEDISPKSIEINLLGANMFSYSVNVEETYPGKLLLRVKDKVSELMPSMSQDSIIVSANQYEVRINSEGRRELLDHSGEWINKEESIIKDISSKEYISFNPKENKIIVKSKNLPELSTLLQEIRNNSNSSDIELEEKVMLAECEINVISNIETQVVEERIEEAKSLTSDSINYIKNEFKLIESISDALCDLKQQNELEDSHFISFEDISETDEGFSIRFINKETGESIFVETEKTIFSEYANHITEEISKIKGTIFDTVNGKLVKKVNLDTTHEVNTLNAAFFIQSLIEYNSSKESLSNLSVAMKVQVYAQLFSTGLNTITDAAKVVELVSTALDETIDLLPTLSEGLPIIATIIDGVSLGAAIKELSETSDPLLRQEIEAKIGIMAVNLTTATTAIITSSLGIASGFSILLVPLAGISAGIPSLVNNELVLRDKATKVVDYFKHVSLVETEGVFTLLDDKVMMPQDDLVISEIDFNNNSIVLGKCEIWRMEGGSGHTVTDDIDHFFSAPSITYREPHLSIYDVLEVQKEELDLSKDLMVLPNAPNRVFAWETGWTPGLRSLENDGTKLLDRIRDNYEGEFYWRYFAFIADALITTLKPRYEDTNIRINLDSNTRSFIVPIITTEYIREKLSYSFYGSGGTYALSLSQYNMGINIELSESDVWIIDVDNVVRDVTIESDKIKKGDLIEGILSTLSIEENKIILNSHEINFSGEVNGSNGFVSLTFSILEGINAIIEVDLLSKSYKLLISGELKILMLNSNHIQQKIDYIGFNSELQKNIPYSFVDSEGKENGFINGSTKEGLFVSELPDVVLISKVYMDDSKPSFGYYSNNLKDVKVITKDNVNILTGYYLKDDIKISLSLTLQDEKTIKLNSVHLDESGVAEILKFMNRKGSTNTSDSLMSFLESMNIKSIFVNFLQSNIKFILDANFIISGTTSIGQFEFICDENNNIQPYFIKFNTLETNYTLYVGNRQNMIVEPNYDLDDSGDISSTVINFSQKYLYGIDSCVNKVVISPNIYTDEINITPVYETNNTYPEVIVLDANYINEKINVNINDLSIRYVWSNDGNDFILMSTSEENKVSQVKIRFVNVFKDKTLANKLSFNFSDKQDVPVSEIILSFTPSYYEDGLIGYDLGLVSLYNEKFYINNFGMMVSGLIYINDSLYYFKPPVNNLITGFVTVGDDKYYFNPINGGAASIGETIIDDKNYYFNQSGVLQTGVFSTEDGFKYFAPANTLDENLEGEAIDFTGKLIIDENIYYFEDNYRGAVEWKELDGEMHYFSPETGKAFKGLNQIGDDKYYFNSDGVMQKGFVSINDNKHYFDDSGVMKVGYTEIDGKHFYFAENGEMQIGVFNTEDGFKYFAHHNEDLGNEEGEEISYSGILNFNNKIYYFDDSFTAVVGWKDLEDGSKYYFDEDTAEAYIGLSLINDGQYYFNDDGIMQVGFVTINDKVFYFSDSGIIESGVQNIDDNYFYIDDNGIVQIGVFDTSDGYKYFAPANTVNDNIYGQAVEYSGLVRVGEDVYYFGETYTIETGWIYDMENESDKYYFDPETKKACKGINLIDDIKYYFDEKGIMRTGLISFENNNYYFNENGEMQFGYINIEDKMFYFGEDGVMQIGVFNTPDGFKYFAHQNTLDENFEGESINYTGWLDLDEKRYYFTDEYIAATGSVIIDGEEYYFDPDTAQLVISE

SEQ ID NO: 724 - protein, 2365 aa, Artificial Sequence; identical to SEQ ID NO: 713
  Synthetic amino acid sequence

SEQ ID NO: 725 - protein, 2365 aa, Artificial Sequence; identical to SEQ ID NO: 718
  Synthetic amino acid sequence

SEQ ID NO: 726 - protein, 2365 aa, Artificial Sequence; identical to SEQ ID NO: 717
  Synthetic amino acid sequence

SEQ ID NO: 727 - protein, 2365 aa, Artificial Sequence; identical to SEQ ID NO: 718
  Synthetic amino acid sequence

SEQ ID NO: 728 - protein, 2366 aa, Artificial Sequence
  Synthetic amino acid sequence
SLVNRKQLEKMANVRFRVQEDEYVAILDALEEYHNMSENTVVEKYLKLKDINSLTDTYIDTYKKSGRNKALKKFKEYLVTEILELKNSNLTPVEKNLHFIWIGGQINDTAINYINQWKDVNSDYNVNVFYDSNAFLINTLKKTIIESASNDTLESFRENLNDPEFNHTAFFRKRMQIIYDKQQNFINYYKAQKEENPDLIIDDIVKTYLSNEYSKDIDELNAYIEESLNKVTENSGNDVRNFEEFKTGEVFNLYEQELVERWNLAGASDILRVAILKNIGGVYLAVAMLPGIHPDLFKDINKPDSVKTAVDWEEMQLEAIMKYKEYIPEYTSKHFDTLDEEVQSSFESVLASKSDKSEIFLPLGDIEVSPLEVKIAFAKGSIINQALISAKDSYCSDLLIKQIQNRYKILNDTLGPIISQGNDFNTTMNNFGESLGAIANEENISFIAKIGSYLRVGFYPEANTTITLSGPTIYAGAYKDLLTFKEMSIDTSILSSELRNFEFPKVNISQATEQEKNSLWQFNEERAKIQFEEYKKNYFEGALGEDDNLDFSQNTVIDKEYLLEKISSSTKSSERGYVHYIVQLQGDKISYEAACNLFAKNPYDSILFQKNIEDSEVAYYYNPTDSEIQEIDKYRIPDRISDRPKIKLTLIGHGKAEFNTDIFAGLDVDSLSSEIETIIDLAKADISPKSIEINLLGANMFSYSVNVEETYPGKLLLRVKDKVSELMPSISQDSIIVSANQYEVRINSEGRRELLDHSGEWINKEESIIKDISSKEYISFNPKENKIIVKSKNLPELSTLLQEIRNNSNSSDIELEEKVMLAECEINVISNIETQVVEERIEEAKSLTSDSINYIKNEFKLIESISDALYDLKQQNELEESHFISFEDISETDEGFSIRFIDKETGESIFVETEKAIFSEYANHITEEISKIKGTIFDTVNGKLVKKVNLDATHEVNTLNAAFFIQSLIEYNSSKESLSNLSVAMKVQVYAQLFSTGLNTITDAAKVVELVSTALDETIDLLPTLSEGLPVIATIIDGVSLGAAIKELSETSDPLLRQEIEAKIGIMAVNLTAATTAIITSSLGIASGFSILLVPLAGISAGIPSLVNNELILRDKATKVVDYFSHISLAESEGAFTSLDDKIMMPQDDLVISEIDFNNNSITLGKCEIWRMEGGSGHTVTDDIDHFFSSPSITYREPHLSIYDVLEVKKEELDLSKDLMVLPNAPNRVFGWETGWTPGLRGLENDGTKLLDRIRDQYEGQFYWRFFAFIADALITTLKPRYEDTNVRISLDSNTRSFIVPVITTEYIREKLSYSFYGSGGTYALSLSQYNMNINIELNENDTWVIDVDNVVRSVTIESDKIKKGDLIENILSKLSIEDNKIILDNHEINFSGTLNGGNGFVSLTFSILEGINAVIEVDLLSKSYKVLISGELKTLMANSNSVQQKIDYIGLNSELQKNIPYSFMDDKGKENGFINCSTKEGLFVSELSDVVLIIKVYMDNSKPPFGYYSNDLKDVKAITKDDVIILTGYYLKDDIKISLSFTIQDKNTIKLNGVYLDENGVAEILKFMNKKGSTNTSDSLMSFLESMNIKSIFIKSLKSNAKLILDTNFIISGTTSIGQFEFICDKDNNIQPYFIKFNTLETKYTLYVGNRQNMIVEPNYDLDDSGDISSTVINFSQKYLYGIDSCVNKVIISPNIYTDEINITPIYEANNTYPEVIVLDTNYISEKINININDLSIRYVWSNDGSDFILMSTDEENKVSQVKIRFTNVFKGNTISDKISFNFSDKQDVSINKIISTFTPSYYVEGLLNYHLGLISLYNEKFYINNFGMMVSGLVYINDSLYYFKPPIKNLITGFTTIGDDKYYFNPDNGGAASVGETIIDGKNYYFSPNGVLQTGVFSTEDGFKYFAPADTLDENLEGEAIDFTGKLIIDENVYYFGDNYRAAIEWQTLDDEVYYFSTDTGRAFKGLNQIGDDKFYFNSDGIMQKGFVNINDKTFYFDDSGVMKSGYTEIDGKHFYFAENGEMQIGVFNTADGFKYFAHHDEDLGNEEGEALSYSGILNFNNKIYYFDDSFTAVVGWKDSEDGSKYYFDEDTAEAYIGISTINDGKYYFNDSGIMQIGFVTINNEVFYFSDSGIVESGMQNIDDNYFYIDENGLVQIGVFDTSDGYKYFAPANTVNDNIYGQAVEYSGLVRVGEDVYYFGETYTIETGWIYDMENESDKYYFDPETKKAYKGINVIDDIKYYFDENGIMRTGLITFEDNHYYFNEDGIMQYGYINIEDKMFYFNEDGVMQIGVFNTADGFKYFAHQNTLDENFEGESINYTGWLDLDEKRYYFTDEYIAAIGSVIIDGEEYYFDPDTAELVISE

SEQ ID NO: 729 - protein, 2366 aa, Artificial Sequence; identical to SEQ ID NO: 728
  Synthetic amino acid sequence

SEQ ID NO: 730 - protein, 2366 aa, Artificial Sequence
  Synthetic amino acid sequence
SLVNRKQLEKMANVRFRVQEDEYVAILDALEEYHNMSENTVVEKYLKLKDINSLTDTYIDTYKKSGRNKALKKFKEYLVTEILELKNSNLTPVEKNLHFIWIGGQINDTAINYINQWKDVNSDYNVNVFYDSNAFLINTLKKTIIESASNDTLESFRENLNDPEFNHTAFFRKRMQIIYDKQQNFINYYKAQKEENPDLIIDDIVKTYLSNEYSKDIDELNAYIEESLNKVTENSGNDVRNFEEFKTGEVFNLYEQELVERWNLAGASDILRVAILKNIGGVYLAVAMLPGIHPDLFKDINKPDSVKTAVDWEEMQLEAIMKYKEYIPEYTSKHFDTLDEEVQSSFESVLASKSDKSEIFLPLGDIEVSPLEVKIAFAKGSIINQALISAKDSYCSDLLIKQIQNRYKILNDTLGPIISQGNDFNTTMNNFGESLGAIANEENISFIAKIGSYLRVGFYPEANTTITLSGPTIYAGAYKDLLTFKEMSIDTSILSSELRNFEFPKVNISQATEQEKNSLWQFNEERAKIQFEEYKKNYFEGALGEDDNLDFSQNTVIDKEYLLEKISSSTKSSERGYVHYIVQLQGDKISYEAACNLFAKNPYDSILFQKNIEDSEVAYYYNPTDSEIQEIDKYRIPDRISDRPKIKLTLIGHGKAEFNTDIFAGLDVDSLSSEIETIIDLAKADISPKSIEINLLGANMFSYSVNVEETYPGKLLLRVKDKVSELMPSISQDSIIVSANQYEVRINSEGRRELLDHSGEWINKEESIIKDISSKEYISFNPKENKIIVKSKNLPELSTLLQEIRNNSNSSDIELEEKVMLAECEINVISNIETQVVEERIEEAKSLTSDSINYIKNEFKLIESISDALYDLKQQNELEESHFISFEDISETDEGFSIRFIDKETGESIFVETEKAIFSEYANHITEEISKIKGTIFDTVNGKLVKKVNLDATHEVNTLNAAFFIQSLIEYNSSKESLSNLSVAMKVQVYAQLFSTGLNTITDAAKVVELVSTALDETIDLLPTLSEGLPVIATIIDGVSLGAAIKELSETSDPLLRQEIEAKIGIMAVNLTAATTAIITSSLGIASGFSILLVPLAGISAGIPSLVNNELILRDKATKVVDYFSHISLAESEGAFTSLDDKIMMPQDDLVISEIDFNNNSITLGKCEIWRMEGGSGHTVTDDIDHFFSSPSITYREPHLSIYDVLEVKKEELDLSKDLMVLPNAPNRVFGWETGWTPGLRGLENDGTKLLDRIRDQYEGQFYWRFFAFIADALITTLKPRYEDTNVRISLDSNTRSFIVPVITTEYIREKLSYSFYGSGGTYALSLSQYNMNINIELNENDTWVIDVDNVVRSVTIESDKIKKGDLIENILSKLSIEDNKIILDNHEINFSGTLNGGNGFVSLTFSILEGINAVIEVDLLSKSYKVLISGELKTLMANSNSVQQKIDYIGLNSELQKNIPYSFMDDKGKENGFINCSTKDGLFVSELSDVVLIIKVYMDNSKPPFGYYSNDLKDVKAITKDDVIILTGYYLKDDIKISLSFTIQDKNTIKLNGVYLDENGVAEILKFMNKKGSTNTSDSLMSFLESMNIKSIFIKSLKSNAKLILDTNFIISGTTSIGQFEFICDKDNNIQPYFIKFNTLETKYTLYVGNRQNMIVEPNYDLDDSGDISSTVINFSQKYLYGIDSCVNKVIISPNIYTDEINITPIYEANNTYPEVIVLDTNYISEKINININDLSIRYVWSNDGSDFILMSTDEENKVSQVKIRFTNVFKGNTISDKISFNFSDKQDVSINKIISTFTPSYYVEGLLNYHLGLISLYNEKFYINNFGMMVSGLVYINDSLYYFKPPIKNLITGFTTIGDDKYYFNPDNGGAASVGETIIDGKNYYFSPNGVLQTGVFSTEDGFKYFAPADTLDENLEGEAIDFTGKLIIDENVYYFGDNYRAAIEWQTLDDEVYYFSTDTGRAFKGLNQIGDDKFYFNSDGIMQKGFVNINDKTFYFDDSGVMKSGYTEIDGKHFYFAENGEMQIGVFNTADGFKYFAHHDEDLGNEEGEALSYSGILNFNNKIYYFDDSFTAVVGWKDSEDGSKYYFDEDTAEAYIGISTINDGKYYFNDSGIMQIGFVTINNEVFYFSDSGIVESGMQNIDDNYFYIDENGLVQIGVFDTSDGYKYFAPANTVNDNIYGQAVEYSGLVRVGEDVYYFGETYTIETGWIYDMENESDKYYFDPETKKAYKGINVIDDIKYYFDENGIMRTGLITFEDNHYYFNEDGIMQYGYINIEDKMFYFNEDGVMQIGVFNTADGFKYFAHQNTLDENFEGESINYTGWLDLDEKRYYFTDEYIAAIGSVIIDGEEYYFDPDTAELVISE

SEQ ID NO: 731 - protein, 2365 aa, Artificial Sequence; identical to SEQ ID NO: 713
  Synthetic amino acid sequence

SEQ ID NO: 732 - protein, 2365 aa, Artificial Sequence; identical to SEQ ID NO: 717
  Synthetic amino acid sequence

SEQ ID NO: 733 - protein, 2365 aa, Artificial Sequence
  Synthetic amino acid sequence
SLVNRKQLEKMANVRFRTQEDEYVAILDALEEYHNMSENTVVEKYLKLKDINSLTDIYIDTYKKSGRNKALKKFKEYLVTEVLELKNNNLTPVEKNLHFVWIGGQINDTAINYINQWKDVNSDYNVNVFYDSNAFLINTLKKTVVESAINDTLESFRENLNDPRFDYNKFFRKRMEIIYDKQKNFINYYKAQREENPELIIDDIVKTYLSNEYSKEIDELNTYIEESLNKITQNSGNDVRNFEEFKNGESFNLYEQELVERWNLAAASDILRISALKEIGGMYLAVAMLPGIQPDLFESIEKPSSVTVDFWEMTKLEAIMKYKEYIPEYTSEHFDMLDEEVQSSFESVLASKSDKSEIFSSLGDMEASPLEVKIAFNSKGIINQGLISVKDSYCSNLIVKQIENRYKILNNSLNPAISEDNDFNTTTNTFIDSIMAEANADNGRFMMELGKYLRVGFFPDVKTTINLSGPEAYAAAYQDLLMFKEGSMNIHLIEADLRNFEISKTNISQSTEQEMASLWSFDDARAKAQFEEYKRNYFEGSLGEDDNLDFSQNIVVDKEYLLEKISSLARSSERGYIHYIVQLQGDKISYEAACNLFAKTPYDSVLFQKNIEDSEIAYYYNPGDGEIQEIDKYKIPSIISDRPKIKLTFIGHGKDEFNTDIFAGFDVDSLSTEIEAAIDLAKEDISPKSIEINLLGANMFSYSINVEETYPGKLLLKVKDKISELMPSISQDSIIVSANQYEVRINSEGRRELLDHSGEWINKEESIIKDISSKEYISFNPKENKITVKSKNLPELSTLLQEIRNNSNSSDIELEEKVMLTECEINVISNIDTQIVEERIEEAKNLTSDSINYIKDEFKLIESISDALCDLKQQNELEDSHFISFEDISETDEGFSIRFINKETGESIFVETEKTIFSEYANHITEEISKIKGTIFDTVNGKLVKKVNLDTTHEVNTLNAAFFIQSLIEYNSSKESLSNLSVAMKVQVYAQLFSTGLNTITDAAKVVELVSTALDETIDLLPTLSEGLPIIATIIDGVSLGAAIKELSETSDPLLRQEIEAKIGIMAVNLTTATTAIITSSLGIASGFSILLVPLAGISAGIPSLVNNELVLRDKATKVVDYFKHVSLVETEGVFTLLDDKIMMPQDDLVISEIDFNNNSIVLGKCEIWRMEGGSGHTVTDDIDHFFSAPSITYREPHLSIYDVLEVQKEELDLSKDLMVLPNAPNRVFAWETGWTPGLRSLENDGTKLLDRIRDNYEGEFYWRYFAFIADALITTLKPRYEDTNIRINLDSNTRSFIVPIITTEYIREKLSYSFYGSGGTYALSLSQYNMGINIELSESDVWIIDVDNVVRDVTIESDKIKKGDLIEGILSTLSIEENKIILNSHEINFSGEVNGSNGFVSLTFSILEGINAIIEVDLLSKSYKLLISGELKILMLNSNHIQQKIDYIGFNSELQKNIPYSFVDSEGKENGFINGSTKEGLFVSELPDVVLISKVYMDDSKPSFGYYSNNLKDVKVITKDNVNILTGYYLKDDIKISLSLTLQDEKTIKLNSVHLDESGVAEILKFMNRKGNTNTSDSLMSFLESMNIKSIFVNFLQSNIKFILDANFIISGTTSIGQFEFICDENDNIQPYFIKFNTLETNYTLYVGNRQNMIVEPNYDLDDSGDISSTVINFSQKYLYGIDSCVNKVVISPNIYTDEINITPVYETNNTYPEVIVLDANYINEKINVNINDLSIRYVWSNDGNDFILMSTSEENKVSQVKIRFVNVFKDKTLANKLSFNFSDKQDVPVSEIILSFTPSYYEDGLIGYDLGLVSLYNEKFYINNFGMMLSGLIYINDSLYYFKPPVNNLITGFVTVGDDKYYFNPINGGAASIGETIIDDKNYYFNQSGVLQTGVFSTEDGFKYFAPANTLDENLEGEAIDFTGKLIIDENIYYFDDNYRGAVEWKELDGEMHYFSPETGKAFKGLNQIGDDKYYFNSDGVMQKGFVSINDNKHYFDDSGVMKVGYTEIDGKHFYFAENGEMQIGVFNTEDGFKYFAHHNEDLGNEEGEEISYSGILNFNNKIYYFDDSFTAVVGWKDLEDGSKYYFDEDTAEAYIGLSLINDGQYYFNDDGIMQVGFVTINDKVFYFSDSGIIESGVQNIDDNYFYIDDNGIVQIGVFDTSDGYKYFAPANTVNDNIYGQAVEYSGLVRVGEDVYYFGETYTIETGWIYDMENESDKYYFNPETKKACKGINLIDDIKYYFDEKGIMRTGLISFENNNYYFNENGEMQFGYINIEDKMFYFGEDGVMQIGVFNTPDGFKYFAHQNTLDENFEGESINYTGWLDLDEKRYYFTDEYIAATGSVIIDGEEYYFDPDTAQLVISE

SEQ ID NO: 734 - protein, 2365 aa, Artificial Sequence; identical to SEQ ID NO: 713
  Synthetic amino acid sequence

SEQ ID NO: 735 - protein, 2365 aa, Artificial Sequence; identical to SEQ ID NO: 712
  Synthetic amino acid sequence

SEQ ID NO: 736 - protein, 2365 aa, Artificial Sequence; identical to SEQ ID NO: 713
  Synthetic amino acid sequence

SEQ ID NO: 737 - protein, 2365 aa, Artificial Sequence; identical to SEQ ID NO: 713
  Synthetic amino acid sequence

SEQ ID NO: 738 - protein, 2365 aa, Artificial Sequence
  Synthetic amino acid sequence
SLVNRKQLEKMANVRFRTQEDEYVAILDALEEYHNMSENTVVEKYLKLKDINSLTDIYIDTYKKSGRNKALKKFKEYLVTEVLELKNNNLTPVEKNLHFVWIGGQINDTAINYINQWKDVNSDYNVNVFYDSNAFLINTLKKTVVESAINDTLESFRENLNDPRFDYNKFFRKRMEIIYDKQKNFINYYKAQREENPELIIDDIVKTYLSNEYSKEIDELNTYIEESLNKITQNSGNDVRNFEEFKNGESFNLYEQELVERWNLAAASDILRISALKEIGGMYLAVAMLPGIQPGLFESIEKPSSVTVDFWEMTKLEAIMKYKEYIPEYTSEHFDMLDEEVQSSFESVLASKSDKSEIFSSLGDMEASPLEVKIAFNSKGIINQGLISVKDSYCSNLIVKQIENRYKILNNSLNPAISEDNDFNTTTNTFIDSIMAEANADNGRFMMELGKYLRVGFFPDVKTTINLSGPEAYAAAYQDLLMFKEGSMNIHLIEADLRNFEISKTNISQSTEQEMASLWSFDDARAKAQFEEYKRNYFEGSLGEDDNLDFSQNIVVDKEYLLEKISSLARSSERGYIHYIVQLQGDKISYEAACNLFAKTPYDSVLFQKNIEDSEIAYYYNPGDGEIQEIDKYKIPSIISDRPKIKLTFIGHGKDEFNTDIFAGFDVDSLSTEIEAAIDLAKEDISPKSIEINLLGANMFSYSINVEETYPGKLLLKVKDKISELMPSISQDSIIVSANQYEVRINSEGRRELLDHSGEWINKEESIIKDISSKEYISFNPKENKITVKSKNLPELSTLLQEIRNNSNSSDIELEEKVMLTECEINVISNIDTQIVEERIEEAKNLTSDSINYIKDEFKLIESISDALCDLKQQNELEDSHFISFEDISETDEGFSIRFINKETGESIFVETEKTIFSEYANHITEEISKIKGTIFDTVNGKLVKKVNLDTTHEVNTLNAAFFIQSLIEYNSSKESLSNLSVAMKVQVYAQLFSTGLNTITDAAKVVELVSTALDETIDLLPTLSEGLPIIATIIDGVSLGAAIKELSETSDPLLRQEIEAKIGIMAVNLTTATTAIITSSLGVASGFSILLVPLAGISAGIPSLVNNELVLRDKATKVVDYFKHVSLVETEGVFTLLDDKIMMPQDDLVISEIDFNNNSIVLGKCEIWRMEGGSGHTVTDDIDHFFSAPSITYREPHLSIYDVLEVQKEELDLSKDLMVLPNAPNRVFAWETGWTPGLRSLENDGTKLLDRIRDNYEGEFYWRYFAFIADALITTLKPRYEDTNIRINLDSNTRSFIVPIITTEYIREKLSYSFYGSGGTYALSLSQYNMGINIELSESDVWIIDVDNVVRDVTIESDKIKKGDLIEGILSTLSIEENKIILNSHEINFSGEVNGSNGFVSLTFSILEGINAIIEVDLLSKSYKLLISGELKILMLNSNHIQQKIDYIGFNSELQKNIPYSFVDSEGKENGFINGSTKEGLFVSELPDVVLISKVYMDDSKPSFGYYSNNLKDVKVITKDNVNILTGYYLKDDIKISLSLTLQDEKTIKLNSVHLDESGVAEILKFMNRKGNTNTSDSLMSFLESMNIKSIFVNFLQSNIKFILDANFIISGTTSIGQFEFICDENDNIQPYFIKFNTLETNYTLYVGNRQNMIVEPNYDLDDSGDISSTVINFSQKYLYGIDSCVNKVVISPNIYTDEINITPVYETNNTYPEVIVLDANYINEKINVNINDLSIRYVWSNDGNDFILMSTSEENKVSQVKIRFVNVFKDKTLANKLSFNFSDKQDVPVSEIILSFTPSYYEDGLIGYDLGLVSLYNEKFYINNFGMMVSGLIYINDSLYYFKPPVNNLITGFVTVGDDKYYFNPINGGAASIGETIIDDKNYYFNQSGVLQTGVFSTEDGFKYFAPANTLDENLEGEAIDFTGKLIIDENIYYFDDNYRGAVEWKELDGEMHYFSPETGKAFKGLNQIGDYKYYFNSDGVMQKGFVSINDNKHYFDDSGVMKVGYTEIDGKHFYFAENGEMQIGVFNTEDGFKYFAHHNEDLGNEEGEEISYSGILNFNNKIYYFDDSFTAVVGWKDLEDGSKYYFDEDTAEAYIGLSLINDGQYYFNDDGIMQVGFVTINDKVFYFSDSGIIESGVQNIDDNYFYIDDNGIVQIGVFDTSDGYKYFAPANTVNDNIYGQAVEYSGLVRVGEDVYYFGETYTIETGWIYDMENESDKYYFNPETKKACKGINLIDDIKYYFDEKGIMRTGLISFENNNYYFNENGEMQFGYINIEDKMFYFGEDGVMQIGVFNTPDGFKYFAHQNTLDENFEGESINYTGWLDLDEKRYYFTDEYIAATGSVIIDGEEYYFDPDTAQLVISE

SEQ ID NO: 739 - protein, 2365 aa, Artificial Sequence; identical to SEQ ID NO: 738
  Synthetic amino acid sequence

SEQ ID NO: 740 - protein, 2365 aa, Artificial Sequence; identical to SEQ ID NO: 713
  Synthetic amino acid sequence

SEQ ID NO: 741 - protein, 2365 aa, Artificial Sequence
  Synthetic amino acid sequence
SLVNRKQLEKMANVRFRTQEDEYVAILDALEEYHNMSENTVVEKYLKLKDINSLTDIYIDTYKKSGRNKALKKFKEYLVTEVLELKNNNLTPVEKNLHFVWIGGQINDTAINYINQWKDVNSDYNVNVFYDSNAFLINTLKKTVVESAINDTLESFRENLNDPRFDYNKFFRKRMEIIYDKQKNFINYYKAQREENPELIIDDIVKTYLSNEYSKEIDELNTYIEESLNKITQNSGNDVRNFEEFKNGESFNLYEQELVERWNLAAASDILRISALKEIGGMYLAVAMLPGIQPDLFESIEKPSSVTVDFWEMTKLEAIMKYKEYIPEYTSEHFDMLDEEVQSSFESVLASKSDKSEIFSSLGDMEASPLEVKIAFNSKGIINQGLISVKDSYCSNLIVKQIENRYKILNNSLNPAISEDNDFNTTTNTFIDSIMAEANADNGRFMMELGKYLRVGFFPDVKTTINLSGPEAYAAAYQDLLMFKEGSMNIHLIEADLRNFEISKTNISQSTEQEMASLWSFDDARAKAQFEEYKRNYFEGSLGEDDNLDFSQNIVVDKEYLLEKISSLARSSERGYIHYIVQLQGDKISYEAACNLFAKTPYDSVLFQKNIEDSEIAYYYNPGDGEIQEIDKYKIPSIISDRPKIKLTFIGHGKDEFNTDIFAGFDVDSLSTEIEAAIDLAKEDISPKSIEINLLGANMFSYSINVEETYPGKLLLKVKDKISELMPSISQDSIIVSANQYEVRINSEGRRELLDHSGEWINKEESIIKDISSKEYISFNPKENKITVKSKNLPELSTLLQEIRNNSNSSDIELEEKVMLTECEINVISNIDTQIVEERIEEAKNLTSDSINYIKDEFKLIESISDALCDLKQQNELEDSHFISFEDISETDEGFSIRFINKETGESIFVETEKTIFSEYANHITEEISKIKGTIFDTVNGKLVKKVNLDTTHEVNTLNAAFFIQSLIEYNSSKESLSNLSVAMKVQVYAQLFSTGLNTITDAAKVVELVSTALDETIDLLPTLSEGLPIIATIIDGVSLGAAIKELSETSDPLLRQEIEAKIGIMAVNLTTATTAIITSSLGVASGFSILLVPLAGISAGIPSLVNNELVLRDKATKVVDYFKHVSLVETEGVFTLLDDKIMMPQDDLVISEIDFNNNSIVLGKCEIWRMEGGSGHTVTDDIDHFFSAPSITYREPHLSIYDVLEVQKEELDLSKDLMVLPNAPNRVFAWETGWTPGLRSLENDGTKLLDRIRDNYEGEFYWRYFAFIADALITTLKPRYEDTNIRINLDSNTRSFIVPIITTEYIREKLSYSFYGSGGTYALSLSQYNMGINIELSESDVWIIDVDNVVRDVTIESDKIKKGDLIEGILSTLSIEENKIILNSHEINFSGEVNGSNGFVSLTFSILEGINAIIEVDLLSKSYKLLISGELKILMLNSNHIQQKIDYIGFNSELQKNIPYSFVDSEGKENGFINGSTKEGLFVSELPDVVLISKVYMDDSKPSFGYYSNNLKDVKVITKDNVNILTGYYLKDDIKISLSLTLQDEKTIKLNSVHLDESGVAEILKFMNRKGSTNTSDSLMSFLESMNIKSIFVNFLQSNIKFILDANFIISGTTSIGQFEFICDENDNIQPYFIKFNTLETNYTLYVGNRQNMIVEPNYDLDDSGDISSTVINFSQKYLYGIDSCVNKVVISPNIYTDEINITPVYETNNTYPEVIVLDANYINEKINVNINDLSIRYVWSNDGNDFILMSTSEENKVSQVKIRFVNVFKDKTLANKLSFNFSDKQDVPVSEIILSFTPSYYEDGLIGYDLGLVSLYNEKFYINNFGMMVSGLIYINDSLYYFKPPVNNLITGFVTVGDDKYYFNPINGGAASIGETIIDDKNYYFNQSGVLQTGVFSTEDGFKYFAPANTLDENLEGEAIDFTGKLIIDENIYYFDDNYRGAVEWKELDGEMHYFSPETGKAFKGLNQIGDDKYYFNSDGVMQKGFVSINDNKHYFDDSGVMKVGYTEIDGKHFYFAENGEMQIGVFNTEDGFKYFAHHNEDLGNEEGEEISYSGILNFNNKIYYFDDSFTAVVGWKDLEDGSKYYFDEDTAEAYIGLSLINDGQYYFNDDGIMQVGFVTINDKVFYFSDSGIIESGVQNIDDNYFYIDDNGIVQIGVFDTSDGYKYFAPANTVNDNIYGQAVEYSGLVRVGEDVYYFGETYTIETGWIYDMENESDKYYFNPETKKACKGINLIDDIKYYFDEKGIMRTGLISFENNNYYFNENGEMQFGYINIEDKMFYFGEDGVMQIGVFNTPDGFKYFAHQNTLDENFEGESINYTGWLDLDEKRYYFTDEYIAATGSVIIDGEEYYFDPDTAQLVISE

SEQ ID NO: 742 - protein, 2366 aa, Artificial Sequence; identical to SEQ ID NO: 723
  Synthetic amino acid sequence

SEQ ID NO: 743 - protein, 2365 aa, Artificial Sequence
  Synthetic amino acid sequence
SLVNRKQLEKMANVRFRTQEDEYVAILDALEEYHNMSENTVVEKYLKLKDINSLTDIYIDTYKKSGRNKALKKFKEYLVTEVLELKNNNLTPVEKNLHFVWIGGQINDTAINYINQWKDVNSDYNVNVFYDSNAFLINTLKKTVVESAINDTLESFRENLNDPRFDYNKFFRKRMEIIYDKQKNFINYYKAQREENPELIIDDIVKTYLSNEYSKEIDELNTYIEESLNKITQNSGNDVRNFEEFKNGESFNLYEQELVERWNLAAASDILRISALKEIGGMYLAVAMLPGIQPDLFESIEKPSSVTVDFWEMTKLEAIMKYKEYIPEYTSEHFDMLDEEVQSSFESVLASKSDKSEIFSSLGDMEASPLEVKIAFNSKGIINQGLISVKDSYCSNLIVKQIENRYKILNNSLNPAISEDNDFNTTTNTFIDSIMAEANADNGRFMMELGKYLRVGFFPDVKTTINLSGPEAYAAAYQDLLMFKEGSMNIHLIEADLRNFEISKTNISQSTEQEMASLWSFDDSRAKAQFEEYKRNYFEGSLGEDDNLDFSQNIVVDKEYLLEKISSLARSSERGYIHYIVQLQGDKISYEAACNLFAKTPYDSVLFQKNIEDSEIAYYYNPGDGEIQEIDKYKIPSIISDRPKIKLTFIGHGKDEFNTDIFAGFDVDSLSTEIEAAIDLAKEDISPKSIEINLLGANMFSYSINVEETYPGKLLLKVKDKISELMPSISQDSIIVSANQYEVRINSEGRRELLDHSGEWINKEESIIKDISSKEYISFNPKENKITVKSKNLPELSTLLQEIRNNSNSSDIELEEKVMLTECEINVISNIDTQIVEERIEEAKNLTSDSINYIKDEFKLIESISDALCDLKQQNELEDSHFISFEDISETDEGFSIRFINKETGESIFVETEKTIFSEYANHITEEISKIKGTIFDTVNGKLVKKVNLDTTHEVNTLNAAFFIQSLIEYNSSKESLSNLSVAMKVQVYAQLFSTGLNTITDAAKVVELVSTALDETIDLLPTLSEGLPIIATIIDGVSLGAAIKELSETSDPLLRQEIEAKIGIMAVNLTTATTAIITSSLGVASGFSILLVPLAGISAGIPSLVNNELVLRDKATKVVDYFKHVSLVETEGVFTLLDDKIMMPQDDLVISEIDFNNNSIVLGKCEIWRMEGGSGHTVTDDIDHFFSAPSITYREPHLSIYDVLEVQKEELDLSKDLMVLPNAPNRVFAWETGWTPGLRSLENDGTKLLDRIRDNYEGEFYWRYFAFIADALITTLKPRYEDTNIRINLDSNTRSFIVPIITTEYIREKLSYSFYGSGGTYALSLSQYNMGINIELSESDVWIIDVDNVVRDVTIESDKIKKGDLIEGILSTLSIEENKIILNSHEINFSGEVNGSNGFVSLTFSILEGINAIIEVDLLSKSYKLLISGELKILMLNSNHIQQKIDYIGFNSELQKNIPYSFVDSEGKENGFINGSTKEGLFVSELPDVVLISKVYMDDSKPSFGYYSNNLKDVKVITKDNVNILTGYYLKDDIKISLSLTLQDEKTIKLNSVHLDESGVAEILKFMNRKGSTNTSDSLMSFLESMNIKSIFVNFLQSNIKFILDANFIISGTTSIGQFEFICDENDNIQPYFIKFNTLETNYTLYVGNRQNMIVEPNYDLDDSGDISSTVINFSQKYLYGIDSCVNKVVISPNIYTDEINITPVYETNNTYPEVIVLDANYINEKINVNINDLSIRYVWSNDGNDFILMSTSEENKVSQVKIRFVNVFKDKTLANKLSFNFSDKQDVPVSEIILSFTPSYYEDGLIGYDLGLVSLYNEKFYINNFGMMVSGLIYINDSLYYFKPPVNNLITGFVTVGDDKYYFNPINGGAASIGETIIDDKNYYFNQSGVLQTGVFSTEDGFKYFAPANTLDENLEGEAIDFTGKLIIDENIYYFDDNYRGAVEWKELDGEMHYFSPETGKAFKGLNQIGDDKYYFNSDGVMQKGFVSINDNKHYFDDSGVMKVGYTEIDGKHFYFAENGEMQIGVFNTEDGFKYFAHHNEDLGNEEGEEISYSGILNFNNKIYYFDDSFTAVVGWKDLEDGSKYYFDEDTAEAYIGLSLINDGQYYFNDDGIMQVGFVTINDKVFYFSDSGIIESGVQNIDDNYFYIDDNGIVQIGVFDTSDGYKYFAPANTVNDNIYGQAVEYSGLVRVGEDVYYFGETYTIETGWIYDMENESDKYYFNPETKKACKGINLIDDIKYYFDEKGIMRTGLISFENNNYYFNENGEMQFGYINIEDKMFYFGEDGVMQIGVFNTPDGFKYFAHQNTLDENFEGESINYTGWLDLDEKRYYFTDEYIAATGSVIIDGEEYYFDPDTAQLVISE

SEQ ID NO: 744 - protein, 2365 aa, Artificial Sequence; identical to SEQ ID NO: 743
  Synthetic amino acid sequence

SEQ ID NO: 745 - protein, 2365 aa, Artificial Sequence; identical to SEQ ID NO: 743
  Synthetic amino acid sequence

SEQ ID NO: 746 - protein, 2365 aa, Artificial Sequence
  Synthetic amino acid sequence
SLVNRKQLEKMANVRFRTQEDEYVAILDALEEYHNMSENTVVEKYLKLKDINSLTDIYIDTYKKSGRNKALKKFKEYLVTEVLELKNNNLTPVEKNLHFVWIGGQINDTAINYINQWKDVNSDYNVNVFYDSNAFLINTLKKTVVESAINDTLESFRENLNDPRFDYNKFFRKRMEIIYDKQKNFINYYKAQREENPELIIDDIVKTYLSNEYSKEIDELNTYIEESLNKITQNSGNDVRNFEEFKNGESFNLYEQELVERWNLAAASDILRISALKEIGGMYLAVAMLPGIQPDLFESIEKPSSVTVDFWEMTKLEAIMKYKEYIPEYTSEHFDMLDEEVQSSFESVLASKSDKSEIFSSLGDMEASPLEVKIAFNSKGIINQGLISVKDSYCSNLIVKQIENRYKILNNSLNPAISEDNDFNTTTNTFIDSIMAEANADNGRFMMELGKYLRVGFFPDVKTTINLSGPEAYAAAYQDLLMFKEGSMNIHLIEADLRNFEIFKTNISQSTEQEMASLWSFDDSRAKAQFEEYKRNYFEGSLGEDDNLDFSQNIVVDKEYLLEKISSLARSSERGYIHYIVQLQGDKISYEAACNLFAKTPYDSVLFQKNIEDSEIAYYYNPGDGEIQEIDKYKIPSIISDRPKIKLTFIGHGKDEFNTDIFAGFDVDSLSTEIEAAIDLAKEDISPKSIEINLLGANMFSYSINVEETYPGKLLLKVKDKISELMPSISQDSIIVSANQYEVRINSEGRRELLDHSGEWINKEESIIKDISSKEYISFNPKENKITVKSKNLPELSTLLQEIRNNSNSSDIELEEKVMLTECEINVISNIDTQIVEERIEEAKNLTSDSINYIKDEFKLIESISDALCDLKQQNELEDSHFISFEDISETDEGFSIRFINKETGESIFVETEKTIFSEYANHITEEISKIKGTIFDTVNGKLVKKVNLDTTHEVNTLNAAFFIQSLIEYNSSKESLSNLSVAMKVQVYAQLFSTGLNTITDAAKVVELVSTALDETIDLLPTLSEGLPIIATIIDGVSLGAAIKELSETSDPLLRQEIEAKIGIMAVNLTTATTAIITSSLGVASGFSILLVPLAGISAGIPSLVNNELVLRDKATKVVDYFKHVSLVETEGVFTLLDDKIMMPQDDLVISEIDFNNNSIVLGKCEIWRMEGGSGHTVTDDIDHFFSAPSITYREPHLSIYDVLEVQKEELDLSKDLMVLPNAPNRVFAWETGWTPGLRSLENDGTKLLDRIRDNYEGEFYWRYFAFIADALITTLKPRYEDTNIRINLDSNTRSFIVPIITTEYIREKLSYSFYGSGGTYALSLSQYNMGINIELSESDVWIIDVDNVVRDVTIESDKIKKGDLIEGILSTLSIEENKIILNSHEINFSGEVNGSNGFVSLTFSILEGINAIIEVDLLSKSYKLLISGELKILMLNSNHIQQKIDYIGFNSELQKNIPYSFVDSEGKENGFINGSTKEGLFVSELPDVVLISKVYMDDSKPSFGYYSNNLKDVKVITKDNVNILTGYYLKDDIKISLSLTLQDEKTIKLNSVHLDESGVAEILKFMNRKGSTNTSDSLMSFLESMNIKSIFVNFLQSNIKFILDANFIISGTTSIGQFEFICDENDNIQPYFIKFNTLETNYTLYVGNRQNMIVEPNYDLDDSGDISSTVINFSQKYLYGIDSCVNKVVISPNIYTDEINITPVYETNNTYPEVIVLDANYINEKINVNINDLSIRYVWSNDGNDFILMSTSEENKVSQVKIRFVNVFKDKTLANKLSFNFSDKQDVPVSEIILSFTPSYYEDGLIGYDLGLVSLYNEKFYINNFGMMVSGLIYINDSLYYFKPPVNNLITGFVTVGDDKYYFNPINGGAASIGETIIDDKNYYFNQSGVLQTGVFSTEDGFKYFAPANTLDENLEGEAIDFTGKLIIDENIYYFDDNYRGAVEWKELDGEMHYFSPETGKAFKGLNQIGDDKYYFNSDGVMQKGFVSINDNKHYFDDSGVMKVGYTEIDGKHFYFAENGEMQIGVFNTEDGFKYFAHHNEDLGNEEGEEISYSGILNFNNKIYYFDDSFTAVVGWKDLEDGSKYYFDEDTAEAYIGLSLINDGQYYFNDDGIMQVGFVTINDKVFYFSDSGIIESGVQNIDDNYFYIDDNGIVQIGVFDTSDGYKYFAPANTVNDNIYGQAVEYSGLVRVGEDVYYFGETYTIETGWIYDMENESDKYYFNPETKKACKGINLIDDIKYYFDEKGIMRTGLISFENNNYYFNENGEMQFGYINIEDKMFYFGEDGVMQIGVFNTPDGFKYFAHQNTLDENFEGESINYTGWLDLDEKRYYFTDEYIAATGSVIIDGEEYYFDPDTAQLVISE

SEQ ID NO: 747 - protein, 2365 aa, Artificial Sequence; identical to SEQ ID NO: 746
  Synthetic amino acid sequence

SEQ ID NO: 748 - protein, 2365 aa, Artificial Sequence; identical to SEQ ID NO: 717
  Synthetic amino acid sequence

SEQ ID NO: 749 - protein, 2365 aa, Artificial Sequence
  Synthetic amino acid sequence
SLVNRKQLEKMANVRFRTQEDEYVAILDALEEYHNMSENTVVEKYLKLKDINSLTDIYIDTYKKSGRNKALKKFKEYLVTEVLELKNNNLTPVEKNLHFVWIGGQINDTAINYINQWKDVNSDYNVNVFYDSNAFLINTLKKTVVESAINDTLESFRENLNDPRFDYNKFFRKRMEIIYDKQKNFINYYKAQREENPELIIDDIVKTYLSNEYSKEIDELNTYIEESLNKITQNSGNDVRNFEEFKNGESFNLYEQELVERWNLAAASDILRISALKEIGGMYLAVAMLPGIQPDLFESIEKPSSVTVDFWEMTKLEAIMKYKEYIPEYTSEHFDMLDEEVQSSFESVLASKSDKSEIFSSLGDMEASPLEVKIAFNSKGIINQGLISVKDSYCSNLIVKQIENRYKILNNSLNPAISEDNDFNTTTNTFIDSIMAEANADNGRFMMELGKYLRVGFFPDVKTTINLSGPEAYAAAYQDLLMFKEGSMNIHLIEADLRNFEISKTNISQSTEQEMASLWSFDDARAKAQFEEYKRNYFEGSLGEDDNLDFSQNIVVDKEYLLEKISSLARSSERGYIHYIVQLQGDKISYEAACNLFAKTPYDSVLFQKNIEDSEIAYYYNPGDGEIQEIDKYKIPSIISDRPKIKLTFIGHGKDEFNTDIFAGFDVDSLSTEIEAAIDLAKEDISPKSIEINLLGANMFSYSINVEETYPGKLLLKVKDKISELMPSISQDSIIVSANQYEVRINSEGRRELLDHSGEWINKEESIIKDISSKEYISFNPKENKITVKSKNLPELSTLLQEIRNNSNSSDIELEEKVMLTECEINVISNIDTQIVEERIEEAKNLTSDSINYIKDEFKLIESISDALCDLKQQNELEDSHFISFEDISETEEGFSIRFINKETGESIFVETEKTIFSEYANHITEEISKIKGTIFDTVNGKLVKKVNLDTTHEVNTLNAAFFIQSLIEYNSSKESLSNLSVAMKVQVYAQLFSTGLNTITDAAKVVELVSTALDETIDLLPTLSEGLPIIATIIDGVSLGAAIKELSETSDPLLRQEIEAKIGIMAVNLTTATTAIITSSLGIASGFSILLVPLAGISAGIPSLVNNELVLRDKATKVVDYFKHVSLVETEGVFTLLDDKIMMPQDDLVISEIDFNNNSIVLGKCEIWRMEGGSGHTVTDDIDHFFSAPSITYREPHLSIYDVLEVQKEELDLSKDLMVLPNAPNRVFAWETGWTPGLRSLENDGTKLLDRIRDNYEGEFYWRYFAFIADALITTLKPRYEDTNIRINLDSNTRSFIVPIITTEYIREKLSYSFYGSGGTYALSLSQYNMGINIELSESDVWIIDVDNVVRDVTIESDKIKKGDLIEGILSTLSIEENKIILNSHEINFSGEVNGSNGFVSLTFSILEGINAIIEVDLLSKSYKLLISGELKILMLNSNHIQQKIDYIGFNSELQKNIPYSFVDSEGKENGFINGSTKEGLFVSELPDVVLISKVYMDDSKPSFGYYSNNLKDVKVITKDNVNILTGYYLKDDIKISLSLTLQDEKTIKLNSVHLDESGVAEILKFMNRKGNTNTSDSLMSFLESMNIKSIFVNFLQSNIKFILDANFIISGTTSIGQFEFICDENDNIQPYFIKFNTLETNYTLYVGNRQNMIVEPNYDLDDSGDISSTVINFSQKYLYGIDSCVNKVVISPNIYTDEINITPVYETNNTYPEVIVLDANYINEKINVNINDLSIRYVWSNDGNDFILMSTSEENKVSQVKIRFVNVFKDKTLANKLSFNFSDKQDVPVSEIILSFTPSYYEDGLIGYDLGLVSLYNEKFYINNFGMMVSGLIYINDSLYYFKPPVNNLITGFVTVGDDKYYFNPINGGAASIGETIIDDKNYYFNQSGVLQTGVFSTEDGFKYFAPANTLDENLEGEAIDFTGKLIIDENIYYFEDNYRGAVEWKELDGEMHYFSPETGKAFKGLNQIGDDKYYFNSDGVMQKGFVSINDNKHYFDDSGVMKVGYTEIDGKYFYFAENGEMQIGVFNTEDGFKYFAHHNEDLGNEEGEEISYSGILNFNNKIYYFDDSFTAVVGWKDLEDGSKYYFDEDTAEAYIGLSLINDGQYYFNDDGIMQVGFVTINDKVFYFSDSGIIESGVQNIDDNYFYIDDNGIVQIGVFDTSDGYKYFAPANTVNDNIYGQAVEYSGLVRVGEDVYYFGETYTIETGWIYDMENESDKYYFNPETKKACKGINLIDDIKYYFDEKGIMRTGLISFENNNYYFNENGEMQFGYINIEDKMFYFGEDGVMQIGVFNTPDGFKYFAHQNTLDENFEGESINYTGWLDLDEKRYYFTDEYIAATGSVIIDGEEYYFDPDTAQLVISE

SEQ ID NO: 750 - protein, 2365 aa, Artificial Sequence; identical to SEQ ID NO: 738
  Synthetic amino acid sequence

SEQ ID NO: 751 - protein, 2365 aa, Artificial Sequence
  Synthetic amino acid sequence
SLVNRKQLEKMANVRFRTQEDEYVAILDALEEYHNMSENTVVEKYLKLKDINSLTDIYIDTYKKSGRNKALKKFKEYLVTEVLELKNNNLTPVEKNLHFVWIGGQINDTAINYINQWKDVNSDYNVNVFYDSNAFLINTLKKTIVESAINDTLESFRENLNNPRFDYNKFFRKRMEIIYDKQKNFINYYKAQREENPELIIDDIVKIYLSNEYSKEIDELNTYIEESLNKIKQNSGNDVRNFEEFKNGESFKLYEQELVERWNLAAASDILRISALKEIGGMYLAVAMLPGIQPGLFESIEKPSSVTVDFWEMTKLEAIMKYKEYIPGYTSEHFDMLDEEVQSSFESALASKSDKSEIFSSLGDMEASPLEVKIAFNSKGIINQGLISVKDSYCSNLIVKQIENRYKILNNSLNPAISEDNDFNTTTNTFIDSIMAEANADNGRFMMELGKYLRVGFFPDVKTTVNLSGPEAYAAAYQDLLMFKEGSMNIHLIEADLRNFEISKTNISQSTEQEMASLWTFDDARAKVQFEEYKRNYFEGSLGEDDNLDFSQNIVVDKEYLLEKISSLARSSERGYIHYIVQLQGDKISYEAACNLFAKTPYDSILFQKNIENSEVAYYYNPGDGEIQEIDKYRIPSIISDRPKIKLTFIGHGKDEFNTDIFAGLDVDSLSTEIETAIDLAKEDISSKSIEINLLGANMFSYSINVEETYPGKLLLKVKDKISELMPSISQDSIIVSANQYEVRINNEGRRELLDHSGEWINKEESIIKDISSKEYISFNPKENKITVKSKNLPELSTLLQEIRNNSNLSDIELEEKVMLAECEINVISNIDTQIVEERIEEAKNLTSDSINYIKNEFKLIESISDSLYDLKQQNELDDSHFISFEDISKTEDGFSIRFINKETGESIFVETEKEIFSEYANHIRGEISNIKDTIFDTVNGKLVKKVNLDAIHEVNTLNAAFFIQSLIGYSSSKESLSNLSVAMKVQVYAQLFSTGLNTITDAAKVVELVSTALDETIDLLPTLSEGLPVIATIIDGVSLGAAIKELSETSDPLLRQEIEAKIGIMAVNLTAATTAIITSSLGVASGFSILLVPLAGISAGIPSLVNNELVLRDKATKVVDYFKHISLVETEGAFTLLDDKIMIPQDDLVISEIDFNNNSIVLGKCEIWRMEGGSGHTVTNDIDHFFSSPTITYIKPHLSIYDVLEVQKEELDLSKDLMVLPNAPNRVFAWETGWTPGLRSLENEGTKLLDRIRDHYKGEFYWRYFAFIADALITTLKPRYEDTNIRINLDSNNRSFIVPIITTEHIREKLSYSFHGSGGTYALSLSQYNMGINIELSESDVWIIDVDNVVRDVTIDSDKIKKGDLIEGILSTLSIEDNKIILNHHEINFSGDVNGSNGFISLTFSILEGINAIIEVDLLSKSYKLLISGELKILMLNSNHIQQKIDYIGFNSELQKNIPYSFVDSEGKENGFINGSTKEGLFVSELPDVVLISKVYMDDSKPSFGYYSNNLKDVKVITKDNVNILTGYYLKDDIKISLSFTLQDEKTIKLNGVHLDESGVAEILKFMNKKGSTNTSDSLMSFLESVNIKSIFVNFLQSKINFILDANFIISGTTSIGQFEFICDENDNIQPYFIKFNTLETTYTLYVGNRQNMIVEPNYDLDDSGDISSTVINFSQKYLYGIDSCVNKVVISPNIYTDEINITPVYETNNNYPEVIVLDANYINEKINVNINDLSIRYVWSNDGNDFILMSTSEENKVSQVKIRFVNVFKDKTLANKLSFNFSDKQDVPVSEIISAFTPSYYEDGLIGYDLGLVSLYNEKFYINNFGMMVSGLIYINDSLYYFKPPVNNLITGFVTVGDDKYYFNPTNGGAASIGETIINDKNYYFNQSGILQTGVFSTEDGLKYFAPANTLDENLEGEAIDFTGKLIIDENIYYFEDNYRGAVEWKELDGEMYYFSPETGKAFKGLNQIGDDKYYFNSDGIMQKGFVSINDKKYYFDDSGVMKVGYIEIDGKYFYFAENGEMQIGVFNTSDGFKYFAHHNEDLGNEEGEAISYSGILNFNNKIYYFDYSFTAVVGWKDLEDGSKYYFDEDTAEAYVGLSLINDGQYYFNDDGIMQVGFVTINNKVFYFSDSGIIESGVQNIDDNYFYIDEKGIVQIGVFDTSDEYKYFAPANTVNDNIYGQAVDYSGLVRVGEDIYYFGETYTIETGWIYDMENESDKYYFNPETKKACKGINLIDDIKYYFDENGIMRTGLISFENNDYYFNENGEMQFGYINIEDKMFYFGEDGVMQIGVFNTQDGFKYFAHQNTLDENFEGESINYTGWLDLDEKRYYFTDEYIAATGSVIIDGEEYYFDPDTAQLVISE

SEQ ID NO: 752 - protein, 2365 aa, Artificial Sequence; identical to SEQ ID NO: 751
  Synthetic amino acid sequence

SEQ ID NO: 753 - protein, 2365 aa, Artificial Sequence
  Synthetic amino acid sequence
SLVNRKQLEKMANVRFRTQEDEYVAILDALEEYHNMSENTVVEKYLKLKDINSLTDIYIDTYKKSGRNKALKKFKEYLVTEVLELKNNNLTPVEKNLHFVWIGGQINDTAINYINQWKDVNSDYNVNVFYDSNAFLINTLKKTIVESAINDTLESFRENLNNPRFDYNKFFRKRMEIIYDKQKNFINYYKAQREENPELIIDDIVKIYLSNEYSKEIDELNTYIEESLNKIKQNSGNDVRNFEEFKNGESFKLYEQELVERWNLAAASDILRISALKEIGGMYLAVAMLPGIQPDLFESIEKPSSVTVDFWEMTKLEAIMKYKEYIPGYTSEHFDMLDEEVQSSFESALASKSDKSEIFSSLGDMEASPLEVKIAFNSKGIINQGLISVKDSYCSNLIVKQIENRYKILNNSLNPAISEDNDFNTTTNTFIDSIMAEANADNGRFMMELGKYLRVGFFPDVKTTVNLSGPEAYAAAYQDLLMFKEGSMNIHLIEADLRNFEISKTNISQSTEQEMASLWTFDDARAKVQFEEYKRNYFEGSLGEDDNLDFSQNIVVDKEYLLEKISSLARSSERGYIHYIVQLQGDKISYEAACNLFAKTPYDSILFQKNIENSEVAYYYNPGDGEIQEIDKYRIPSIISDRPKIKLTFIGHGKDEFNTDIFAGLDVDSLSTEIETAIDLAKEDISSKSIEINLLGANMFSYSINVEETYPGKLLLKVKDKISELMPSISQDSIIVSANQYEVRINNEGRRELLDHSGEWINKEESIIKDISSKEYISFNPKENKITVKSKNLPELSTLLQEIRNNSNLSDIELEEKVMLAECEINVISNIDTQIVEERIEEAKNLTSDSINYIKNEFKLIESISDSLYDLKQQNELDDSHFISFEDISKTEDGFSIRFINKETGESIFVETEKEIFSEYANHIRREISNIKDTIFDTVNGKLVKKVNLDAIHEVNTLNAAFFIQSLIGYSSSKESLSNLSVAMKVQVYAQLFSTGLNTITDAAKVVELVSTALDETIDLLPTLSEGLPVIATIIDGVSLGAAIKELSETSDPLLRQEIEAKIGIMAVNLTAATTAIITSSLGIASGFSILLVPLAGISAGIPSLVNNELVLRDKATKVVDYFKHISLVETEGAFTLLDDKIMIPQDDLVISEIDFNNNSIVLGKCEIWRMEGGSGHTVTNDIDHFFSSPTITYIKPHLSIYDVLEVQKEELDLSKDLMVLPNAPNRVFAWETGWTPGLRSLENEGTKLLDRIRDHYKGEFYWRYFAFIADALITTLKPRYEDTNIRINLDSNNRSFIVPIITTEHIREKLSYSFHGSGGTYALSLSQYNMGINIELSESDVWIIDVDNVVRDVTIDSDKIKKGDLIEGILSTLSIEDNKIILNHHEINFSGDVNGSNGFISLTFSILEGINAIIEVDLLSKSYKLLISGELKILMLNSNHIQQKIDYIGFNSELQKNIPYSFVDSEGKENGFINGSTKEGLFVSELPDVVLISKVYMDDSKPSFGYYSNNLKDVKVITKDNVNILTGYYLKDDIKISLSFTLQDEKTIKLNGVHLDESGVAEILKFMNKKGSTNTSDSLMSFLESVNIKSIFVNFLQSKINFILDANFIISGTTSIGQFEFICDENDNIQPYFIKFNTLETTYTLYVGNRQNMIVEPNYDLDDSGDISSTVINFSQKYLYGIDSCVNKVVISPNIYTDEINITPVYETNNNYPEVIVLDANYINEKINVNINDLSIRYVWSNDGNDFILMSTSEENKVSQVKIRFVNVFKDKTLANKLSFNFSDKQDVPVSEIISAFTPSYYEDGLIGYDLGLVSLYNEKFYINNFGMMVSGLIYINDSLYYFKPPVNNLITGFVTVGDDKYYFNPTNGGAASIGETIINDKNYYFNQSGILQTGVFSTEDGLKYFAPANTLDENLEGEAIDFTGKLIIDENIYYFEDNYRGAVEWKELDGEMYYFSPETGKAFKGLNQIGDDKYYFNSDGIMQKGFVSINDKKYYFDDSGVMKVGYIEIDGKYFYFAENGEMQIGVFNTSDGFKYFAHHNEDLGNEEGEAISYSGILNFNNKIYYFDYSFTAVVGWKDLEDGSKYYFDEDTAEAYVGLSLINDGQYYFNDDGIMQVGFVTINNKVFYFSDSGIIESGVQNIDDNYFYIDEKGIVQIGVFDTSDEYKYFAPANTVNDNIYGQAVDYSGLVRVGEDIYYFGETYTIETGWIYDMENESDKYYFNPETKKACKGINLIDDIKYYFDENGIMRTGLISFENNDYYFNENGEMQFGYINIEDKMFYFGEDGVMQIGVFNTQDGFKYFAHQNTLDENFEGESINYTGWLDLDEKRYYFTDEYIAATGSVIIDGEEYYFDPDTAQLVISE

SEQ ID NO: 754 - protein, 2365 aa, Artificial Sequence; identical to SEQ ID NO: 751
  Synthetic amino acid sequence

SEQ ID NO: 755 - protein, 2365 aa, Artificial Sequence; identical to SEQ ID NO: 753
  Synthetic amino acid sequence

SEQ ID NO: 756 - protein, 2365 aa, Artificial Sequence; identical to SEQ ID NO: 753
  Synthetic amino acid sequence

SEQ ID NO: 757 - protein, 2365 aa, Artificial Sequence; identical to SEQ ID NO: 718
  Synthetic amino acid sequence

SEQ ID NO: 758 - protein, 2365 aa, Artificial Sequence; identical to SEQ ID NO: 751
  Synthetic amino acid sequence

SEQ ID NO: 759 - protein, 2365 aa, Artificial Sequence; identical to SEQ ID NO: 753
  Synthetic amino acid sequence

SEQ ID NO: 760 - protein, 2365 aa, Artificial Sequence
  Synthetic amino acid sequence
SLVNRKQLEKMANVRFRTQEDEYVAILDALEEYHNMSENTVVEKYLKLKDINSLTDIYIDTYKKSGRNKALKKFKEYLVIEVLELKNNNLTPVEKNLHFVWIGGQINDTAINYINQWKDVNSDYNVNVFYDSNAFLINTLKKTIVESAINDTLESFRENLNNPRFDYNKFFRKRMEIIYDKQKNFINYYKAQREENPELIIDDIVKIYLSNEYSKEIDELNTYIEESLNKIKQNSGNDVRNFEEFKNGESFKLYEQELVERWNLAAASDILRISALKEIGGMYLAVAMLPGIQPGLFESIEKPSSVTVDFWEMTKLEAIMKYKEYIPGYTSEHFDMLDEEVQSSFESALASKSDKSEIFSSLGDMEASPLEVKIAFNSKGIINQGLISVKDSYCSNLIVKQIENRYKILNNSLNPAISEDNDFNTTTNTFIDSIMAEANADNGRFMMELGKYLRVGFFPDVKTTVNLSGPEAYAAAYQDLLMFKEGSMNIHLIEADLRNFEISKTNISQSTEQEMASLWTFDDARAKVQFEEYKRNYFEGSLGEDDNLDFSQNIVVDKEYLLEKISSLARSSERGYIHYIVQLQGDKISYEAACNLFAKTPYDSILFQKNIENSEVAYYYNPGDGEIQEIDKYRIPSIISDRPKIKLTFIGHGKDEFNTDIFAGLDVDSLSTEIETAIDLAKEDISSKSIEINLLGANMFSYSINVEETYPGKLLLKVKDKISELMPSISQDSIIVSANQYEVRINNEGRRELLDHSGEWINKEESIIKDISSKEYISFNPKENKITVKSKNLPELSTLLQEIRNNSNLSDIELEEKVMLAECEINVISNIDTQIVEERIEEAKNLTSDSINYIKNEFKLIESISDSLYDLKQQNELDDSHFISFEDISKTEDGFSIRFINKETGESIFVETEKEIFSEYANHIRGEISNIKDTIFDTVNGKLVKKVNLDAIHEVNTLNAAFFIQSLIGYSSSKESLSNLSVAMKVQVYAQLFSTGLNTITDAAKVVELVSTALDETIDLLPTLSEGLPVIATIIDGVSLGAAIKELSETSDPLLRQEIEAKIGIMAVNLTAATTAIITSSLGVASGFSILLVPLAGISAGIPSLVNNELVLRDKATKVVDYFKHISLVETEGAFTLLDDKIMIPQDDLVISEIDFNNNSIVLGKCEIWRMEGGSGHTVTNDIDHFFSSPTITYIKPHLSIYDVLEVQKEELDLSKDLMVLPNAPNRVFAWETGWTPGLRSLENEGTKLLDRIRDHYKGEFYWRYFAFIADALITTLKPRYEDTNIRINLDSNNRSFIVPIITTEHIREKLSYSFHGSGGTYALSLSQYNMGINIELSESDVWIIDVDNVVRDVTIDSDKIKKGDLIEGILSTLSIEDNKIILNHHEINFSGDVNGSNGFISLTFSILEGINAIIEVDLLSKSYKLLISGELKILMLNSNHIQQKIDYIGFNSELQKNIPYSFVDSEGKENGFINGSTKEGLFVSELPDVVLISKVYMDDSKPSFGYYSNNLKDVKVITKDNVNILTGYYLKDDIKISLSFTLQDEKTIKLNGVHLDESGVAEILKFMNKKGSTNTSDSLMSFLESVNIKSIFVNFLQSKINFILDANFIISGTTSIGQFEFICDENDNIQPYFIKFNTLETTYTLYVGNRQNMIVEPNYDLDDSGDISSTVINFSQKYLYGIDSCVNKVVISPNIYTDEINITPVYETNNNYPEVIVLDANYINEKINVNINDLSIRYVWSNDGNDFILMSTSEENKVSQVKIRFVNVFKDKTLANKLSFNFSDKQDVPVSEIISAFTPSYYEDGLIGYDLGLVSLYNEKFYINNFGMMVSGLIYINDSLYYFKPPVNNLITGFVTVGDDKYYFNPTNGGAASIGETIINDKNYYFNQSGILQTGVFSTEDGLKYFAPANTLDENLEGEAIDFTGKLIIDENIYYFEDNYRGAVEWKELDGEMYYFSPETGKAFKGLNQIGDDKYYFNSDGIMQKGFVSINDKKYYFDDSGVMKVGYIEIDGKYFYFAENGEMQIGVFNTSDGFKYFAHHNEDLGNEEGEAISYSGILNFNNKIYYFDYSFTAVVGWKDLEDGSKYYFDEDTAEAYVGLSLINDGQYYFNDDGIMQVGFVTINNKVFYFSDSGIIESGVQNIDDNYFYIDEKGIVQIGVFDTSDEYKYFAPANTVNDNIYGQAVDYSGLVRVGEDIYYFGETYTIETGWIYDMENESDKYYFNPETKKACKGINLIDDIKYYFDENGIMRTGLISFENNDYYFNENGEMQFGYINIEDKMFYFGEDGVMQIGVFNTQDGFKYFAHQNTLDENFEGESINYTGWLDLDEKRYYFTDEYIAATGSVIIDGEEYYFDPDTAQLVISE

SEQ ID NO: 761 - protein, 2365 aa, Artificial Sequence; identical to SEQ ID NO: 86
  Synthetic amino acid sequence

SEQ ID NO: 762 - protein, 2710 aa, Clostridium difficile
MSLISKEELIKLAYSIRPRENEYKTILTNLDEYNKLTTNNNENKYLQLKKLNESIDVFMNKYKTSSRNRALSNLKKDILKEVILIKNSNTSPVEKNLHFVWIGGEVSDIALEYIKQWADINAEYNIKLWYDSEAFLVNTLKKAIVESSTTEALQLLEEEIQNPQFDNMKFYKKRMEFIYDRQKRFINYYKSQINKPTVPTIDDIIKSHLVSEYNRDETVLESYRTNSLRKINSNHGIDIRANSLFTEQELLNIYSQELLNRGNLAAASDIVRLLALKNFGGVYLDVDMLPGIHSDLFKTISRPSSIGLDRWEMIKLEAIMKYKKYINNYTSENFDKLDQQLKDNFKLIIESKSEKSEIFSKLENLNVSDLEIKIAFALGSVINQALISKQGSYLTNLVIEQVKNRYQFLNQHLNPAIESDNNFTDTTKIFHDSLFNSATAENSMFLTKIAPYLQVGFMPEARSTISLSGPGAYASAYYDFINLQENTIEKTLKASDLIEFKFPENNLSQLTEQEINSLWSFDQASAKYQFEKYVRDYTGGSLSEDNGVDFNKNTALDKNYLLNNKIPSNNVEEAGSKNYVHYIIQLQGDDISYEATCNLFSKNPKNSIIIQRNMNESAKSYFLSDDGESILELNKYRIPERLKNKEKVKVTFIGHGKDEFNTSEFARLSVDSLSNEISSFLDTIKLDISPKNVEVNLLGCNMFSYDFNVEETYPGKLLLSIMDKITSTLPDVNKNSITIGANQYEVRINSEGRKELLAHSGKWINKEEAIMSDLSSKEYIFFDSIDNKLKAKSKNIPGLASISEDIKTLLLDASVSPDTKFILNNLKLNIESSIGDYIYYEKLEPVKNIIHNSIDDLIDEFNLLENVSDELYELKKLNNLDEKYLISFEDISKNNSTYSVRFINKSNGESVYVETEKEIFSKYSEHITKEISTIKNSIITDVNGNLLDNIQLDHTSQVNTLNAAFFIQSLIDYSSNKDVLNDLSTSVKVQLYAQLFSTGLNTIYDSIQLVNLISNAVNDTINVLPTITEGIPIVSTILDGINLGAAIKELLDEHDPLLKKELEAKVGVLAINMSLSIAATVASIVGIGAEVTIFLLPIAGISAGIPSLVNNELILHDKATSVVNYFNHLSESKKYGPLKTEDDKILVPIDDLVISEIDFNNNSIKLGTCNILAMEGGSGHTVTGNIDHFFSSPSISSHIPSLSIYSAIGIETENLDFSKKIMMLPNAPSRVFWWETGAVPGLRSLENDGTRLLDSIRDLYPGKFYWRFYAFFDYAITTLKPVYEDTNIKIKLDKDTRNFIMPTITTNEIRNKLSYSFDGAGGTYSLLLSSYPISTNINLSKDDLWIFNIDNEVREISIENGTIKKGKLIKDVLSKIDINKNKLIIGNQTIDFSGDIDNKDRYIFLTCELDDKISLIIEINLVAKSYSLLLSGDKNYLISNLSNIIEKINTLGLDSKNIAYNYTDESNNKYFGAISKTSQKSIIHYKKDSKNILEFYNDSTLEFNSKDFIAEDINVFMKDDINTITGKYYVDNNTDKSIDFSISLVSKNQVKVNGLYLNESVYSSYLDFVKNSDGHHNTSNFMNLFLDNISFWKLFGFENINFVIDKYFTLVGKTNLGYVEFICDNNKNIDIYFGEWKTSSSKSTIFSGNGRNVVVEPIYNPDTGEDISTSLDFSYEPLYGIDRYINKVLIAPDLYTSLININTNYYSNEYYPEIIVLNPNTFHKKVNINLDSSSFEYKWSTEGSDFILVRYLEESNKKILQKIRIKGILSNTQSFNKMSIDFKDIKKLSLGYIMSNFKSFNSENELDRDHLGFKIIDNKTYYYDEDSKLVKGLININNSLFYFDPIEFNLVTGWQTINGKKYYFDINTGAALISYKIINGKHFYFNNDGVMQLGVFKGPDGFEYFAPANTQNNNIEGQAIVYQSKFLTLNGKKYYFDNDSKAVTGWRIINNEKYYFNPNNAIAAVGLQVIDNNKYYFNPDTAIISKGWQTVNGSRYYFDTDTAIAFNGYKTIDGKHFYFDSDCVVKIGVFSTSNGFEYFAPANTYNNNIEGQAIVYQSKFLTLNGKKYYFDNNSKAVTGWQTIDSKKYYFNTNTAEAATGWQTIDGKKYYFNTNTAEAATGWQTIDGKKYYFNTNTAIASTGYTIINGKHFYFNTDGIMQIGVFKGPNGFEYFAPANTDANNIEGQAILYQNEFLTLNGKKYYFGSDSKAVTGWRIINNKKYYFNPNNAIAAIHLCTINNDKYYFSYDGILQNGYITIERNNFYFDANNESKMVTGVFKGPNGFEYFAPANTHNNNIEGQAIVYQNKFLTLNGKKYYFDNDSKAVTGWQTIDGKKYYFNLNTAEAATGWQTIDGKKYYFNLNTAEAATGWQTIDGKKYYFNTNTFIASTGYTSINGKHFYFNTDGIMQIGVFKGPNGFEYFAPANTHNNNIEGQAILYQNKFLTLNGKKYYFGSDSKAVTGLRTIDGKKYYFNTNTAVAVTGWQTINGKKYYFNTNTSIASTGYTIISGKHFYFNTDGIMQIGVFKGPDGFEYFAPANTDANNIEGQAIRYQNRFLYLHDNIYYFGNNSKAATGWVTIDGNRYYFEPNTAMGANGYKTIDNKNFYFRNGLPQIGVFKGSNGFEYFAPANTDANNIEGQAIRYQNRFLHLLGKIYYFGNNSKAVTGWQTINGKVYYFMPDTAMAAAGGLFEIDGVIYFFGVDGVKAPGIYG

SEQ ID NO: 763 - protein, 2710 aa, Clostridium difficile; identical to SEQ ID NO: 107

SEQ ID NO: 764 - protein, 2710 aa, Clostridium difficile; identical to SEQ ID NO: 136

SEQ ID NO: 765 - protein, 2710 aa, Clostridium difficile; identical to SEQ ID NO: 140

SEQ ID NO: 766 - protein, 2710 aa, Clostridium difficile; identical to SEQ ID NO: 151

SEQ ID NO: 767 - protein, 2710 aa, Clostridium difficile; identical to SEQ ID NO: 15

SEQ ID NO: 768 - protein, 2710 aa, Clostridium difficile; identical to SEQ ID NO: 100

SEQ ID NO: 769 - protein, 2710 aa, Clostridium difficile; identical to SEQ ID NO: 135

SEQ ID NO: 770 - protein, 2710 aa, Clostridium difficile; identical to SEQ ID NO: 88

SEQ ID NO: 771 - protein, 2710 aa, Clostridium difficile; identical to SEQ ID NO: 178

SEQ ID NO: 772 - protein, 2710 aa, Clostridium difficile; identical to SEQ ID NO: 92

SEQ ID NO: 773 - protein, 2710 aa, Clostridium difficile; identical to SEQ ID NO: 95

SEQ ID NO: 774 - protein, 2710 aa, Clostridium difficile; identical to SEQ ID NO: 97

SEQ ID NO: 775 - protein, 2710 aa, Clostridium difficile; identical to SEQ ID NO: 98

SEQ ID NO: 776 - protein, 2710 aa, Clostridium difficile; identical to SEQ ID NO: 102

SEQ ID NO: 777 - protein, 2710 aa, Clostridium difficile; identical to SEQ ID NO: 157

SEQ ID NO: 778 - protein, 2710 aa, Clostridium difficile; identical to SEQ ID NO: 150

SEQ ID NO: 779 - protein, 2710 aa, Clostridium difficile
MSLISKEELIKLAYSIRPRENEYKTILTNLDEYNKLTTNNNENKYLQLKKLNESIDVFMNKYKNSSRNRALSNLKKDILKEVILIKNSNTSPVEKNLHFVWIGGEVSDIALEYIKQWADINAEYNIKLWYDSEAFLVNTLKKAIVESSTTEALQLLEEEIQNPQFDNMKFYKKRMEFIYDRQKRFINYYKSQINKPTVPTIDDIIKSHLVSEYNRDETLLESYRTNSLRKINSNHGIDIRANSLFTEQELLNIYSQELLNRGNLAAASDIVRLLALKNFGGVYLDVDMLPGIHSDLFKTISRPSSIGLDRWEMIKLEAIMKYKKYINNYTSENFDKLDQQLKDNFKLIIESKSEKSEIFSKLENLNVSDLEIKIAFALGSVINQALISKQGSYLTNLVIEQVKNRYQFLNQHLNPAIESDNNFTDTTKIFHDSLFNSATAENSMFLTKIAPYLQVGFMPEARSTISLSGPGAYASAYYDFINLQENTIEKTLKASDLIEFKFPENNLSQLTEQEINSLWSFDQASAKYQFEKYVRDYTGGSLSEDNEVDFNKNTALDKNYLLNNKIPSNNVEEAGSKNYVHYIIQLQGDDISYEATCNLFSKNPKNSIIIQRNMNESAKSYFLSDDGESILELNKYRIPERLKNKEKVKVTFIGHGKDEFNTSEFARLSVDSLSNEISSFLDTIKLDISPKNVEVNLLGCNMFSYDFNVEETYPGKLLLSIMDKITSTLPDVNKDSITIGANQYEVRINSEGRKELLAHSGKWINKEEAIMSDLSSKEYIFFDSIDNKLKAKSKNIPGLASISEDIKTLLLDASVSPDTKFILNNLKLNIESSIGDYIYYEKLEPVKNIIHNSIDDLIDEFNLLENVSDELYELKKLNNLDEKYLISFEDISKNNSTYSVRFINKSNGESVYVETEKEIFSKYSEHITKEISTIKNSIITDVNGNLLDNIQLDHTSQVNTLNAAFFIQSLIDYSSNKDVLNDLSTSVKVQLYAQLFSTGLNTIYDSIQLVNLISNAVNDTINVLPTITEGIPIVSTILDGINLGAAIKELLDEHDPLLKKELEAKVGVLAINMSLSIAATVASIVGIGAEVTIFLLPIAGISAGIPSLVNNELILHDKATSVVNYFNHLSESKEYGPLKTEDDKILVPIDDLVISEIDFNNNAIKLGTCNILAMEGGSGHTVTGNIDHFFSSPSISSHIPSLSIYSAIGIKTENLDFSKKIMMLPNAPSRVFWWETGAVPGLRSLENNGTKLLDSIRDLYPGKFYWRFYAFFDYAITTLKPVYEDTNIKIKLDKDTRNFIMPTITTNEIRNKLSYSFDGAGGTYSLLLSSYPISTNINLSKDDLWIFNIDNEVREISIENGTIKKGKLIKDVLSKIDINKNKLIIGNQTIDFSGDIDNKDRYIFLTCELDDKISLIIEINLVAKSYSLLLSGDKNYLISNLSNTIEKINTLGLDSKNIAYNYTDESNNKYFGAISKTSQKSIIHYKKDSKNILEFYNGSTLEFNSKDFIAEDINVFMKDDINTITGKYYVDNNTDKSIDFSISLVSKNQVKVNGLYLNESVYSSYLDFVKNSDGHHNTSNFMNLFLDNISFWKLFGFENINFVVDKYFTLVGKTNLGYVEFICDNNKNIDIYFGEWKTSSSKSTIFSGNGRNVVVEPIYNPDTGEDISTSLDFSYEPLYGIDRYINKVLIAPDLYTSLININTNYYSNEYYPEIIVLNPNTFHKKVNINLDSSSFEYKWSTEGSDFILVRYLEESNKKILQKIRIKGILSNTQSFNKMSIDFKDIKKLSLVYIMSNFKSFNSENELDRDHLGFKIIDNKTYYYDEASKLVKGLININNSLFYFDPIESNLVTGWQTINGKKYYFDINTGAASTSYKIINGKHFYFNNNGVMQLGVFKGPDGFEYFAPANTQNNNIEGQAIVYQSKFLTLNGKKYYFDNNSKAVTGWRIINNEKYYFNPNNAIAAVGLQVIDNNKYYFNPDTAIISKGWQTVNGSRYYFDTDTAIAFNGYKTIDGKHFYFDSDCVVKIGVFSGSNGFEYFAPANTYNNNIEGQAIVYQSKFLTLNGKKYYFDNNSKAVTGWQTIDSKKYYFNTNTAEAATGWQTIDGKKYYFNTNTAEAATGWQTIDGKKYYFNTNTSIASTGYTIINGKHFYFNTDGIMQIGVFKGPNGFEYFAPANTHNNNIEGQAILYQNKFLTLNGKKYYFGSDSKAITGWQTIDGKKYYFNPNNAIAATHLCTINNDKYYFSYDGILQNGYITIERNNFYFDANNESKMVTGVFKGPNGFEYFAPANTHNNNIEGQAIVYQNKFLTLNGKKYYFDNDSKAVTGWQTIDGKKYYFNLNTAVAVTGWQTIDGKKYYFNLNTAEAATGWQTIDGKKYYFNTNTFIASTGYTIINGKHFYFNTDGIMQIGVFKGTNGFEYFAPANTHNNNIEGQAILYQNKFLTLNGKKYYFGSDSKAVTGLRTIDGKKYYFNTNTAVAVTGWQTINGKKYYFNTNTSIASTGYTIISGKHFYFNTDGIMQIGVFKGSDGFEYFAPANTDANNIEGQAIRYQNRFLYLHDNIYYFGNNSKAVTGWATIDGNRYYFEPDTAMGTNGYKTIDNKNFYFRNGLPQIGVFKGPNGFEYFAPANTDANNIDGQAIRYQNRFLHLLGNIYYFGNNSKAVTGWQTINGKVYYFMPDTAMAAAGGLFEIDGVIYFFGVDGVKAPGIYG

SEQ ID NO: 780 - protein, 2710 aa, Clostridium difficile
MSLISKEELIKLAYSIRPRENEYKTILTNLDEYNKLTTNNNENKYLQLKKLNESIDVFMNKYKNSSRNRALSNLKKDILKEVILIKNSNTSPVEKNLHFVWIGGEVSDIALEYIKQWADINAEYNIKLWYDSEAFLVNTLKKAIVESSTTEALQLLEEEIQNPQFDNMKFYKKRMEFIYDRQKRFINYYKSQINKPTVPTIDDIIKSHLVSEYNRDETLLESYRTNSLRKINSNHGIDIRANSLFTEQELLNIYSQELLNRGNLAAASDIVRLLALKNFGGVYLDVDMLPGIHSDLFKTIPRPSSIGLDRWEMIKLEAIMKYKKYINNYTSENFDKLDQQLKDNFKLIIESKSEKSEIFSKLENLNVSDLEIKIAFALGSVINQALISKQGSYLTNLVIEQVKNRYQFLNQHLNPAIESDNNFTDTTKIFHDSLFNSATAENSMFLTKIAPYLQVGFMPEARSTISLSGPGAYASAYYDFINLQENTIEKTLKASDLIEFKFPENNLSQLTEQEINSLWSFDQASAKYQFEKYVRDYTGGSLSEDNGVDFNKNTALDKNYLLNNKIPSNNVEEAGSKNYVHYIIQLQGDDISYEATCNLFSKNPKNSIIIQRNMNESAKSYFLSDDGESILELNKYRIPERLKNKEKVKVTFIGHGKDEFNTSEFARLSVDSLSNEISSFLDTIKLDISPKNVEVNLLGCNMFSYDFNVEETYPGKLLLSIMDKITSTLPDVNKDSITIGANQYEVRINSEGRKELLAHSGKWINKEEAIMSDLSSKEYIFFDSIDNKLKAKSKNIPGLASISEDIKTLLLDASVSPDTKFILNNLKLNIESSIGDYIYYEKLEPVKNIIHNSIDDLIDEFNLLENVSDELYELKKLNNLDEKYLISFEDISKNNSTYSVRFINKSNGESVYVETEKEIFSKYSEHITKEISTIKDSIITDVNGNLLDNIQLDHTSQVNTLNAAFFIQSLIDYSSNKDVLNDLSTSVKVQLYAQLFSTGLNTIYDSIQLVNLISNAVNDTINVLPTITEGIPIVSTILDGINLGAAIKELLDEHDPLLKKELEAKVGVLAINMSLSIAATVASIVGIGAEVTIFLLPIAGISAGIPSLVNNELILHDKATSVVNYFNHLSESKKYGPLKTEDDKILVPIDDLVISEIDFNNNSIKLGTCNILAMEGGSGHTVTGNIDHFFSSPYISSHIPSLSVYSAIGIKTENLDFSKKIMMLPNAPSRVFWWETGAVPGLRSLENDGTKLLDSIRDLYPGKFYWRFYAFFDYAITTLKPVYEDTNIKIKLDKDTRNFIMPTITTDEIRNKLSYSFDGAGGTYSLLLSSYPISMNINLSKDDLWIFNIDNEVREISIENGTIKKGNLIEDVLSKIDINKNKLIIGNQTIDFSGDIDNKDRYIFLTCELDDKISLIIEINLVAKSYSLLLSGDKNYLISNLSNTIEKINTLGLDSKNIAYNYTDESNNKYFGAISKTSQKSIIHYKKDSKNILEFYNGSTLEFNSKDFIAEDINVFMKDDINTITGKYYVDNNTDKSIDFSISLVSKNQVKVNGLYLNESVYSSYLDFVKNSDGHHNTSNFMNLFLNNISFWKLFGFENINFVIDKYFTLVGKTNLGYVEFICDNNKNIDIYFGEWKTSSSKSTIFSGNGRNVVVEPIYNPDTGEDISTSLDFSYEPLYGIDRYINKVLIAPDLYTSLININTNYYSNEYYPEIIVLNPNTFHKKVNINLDSSSFEYKWSTEGSDFILVRYLEESNKKILQKIRIKGILSNTQSFNKMSIDFKDIKKLSLGYIMSNFKSFNSENELDRDHLGFKIIDNKTYYYDEDSKLVKGLININNSLLYFDPIESNLVTGWQTINGKKYYFDINTGAASTSYKIINGKHFYFNNDGVMQLGVFKGPDGFEYFAPANTQNNNIEGQAIVYQSKFLTLNGKKYYFDNDSKAVTGWRIINNEKYYFNPNNAIAAVGLQVIDNNKYYFNPDTAIISKGWQTVNGSRYYFDTDTAIAFNGYKTIDGKHFYFDSDCVVKIGVFSGSNGFEYFAPANTYNNNIEGQAIVYQSKFLTLNGKKYYFDNNSKAVTGWQTIDSKKYYFNTNTAEAATGWQTIDGKKYYFNLNTAEAATGWQTIDGKKYYFNTNTSIASTGYTIINGKYFYFNTDGIMQIGVFKGPNGFEYFAPANTHNNNIEGQAILYQNKFLTLNGKKYYFGSDSKAITGWQTIDGKKYYFNPNNAIAATHLYTINNDKYYFSYDGILQNGYITIERNNFYFDANNESKMVTGVFKGPNGFEYFAPANTHNNNIEGQAIVYQNKFLTLNGKKYYFDNDSKAVTGWQTIDSKKYYFNLNTAVAVTGWQTIDGEKYYFNLNTAEAATGWQTIDGKRYYFNTNTYIASTGYTIINGKHFYFNTDGIMQIGVFKGPDGFEYFAPANTDANNIEGQAILYQNKFLTLNGKKYYFGSDSKAVTGLRTIDGKKYYFNTNTAVAVTGWQTINGKKYYFNTNTSIASTGYTIISGKHFYFNTDGIMQIGVFKGPDGFEYFAPANTDANNIEGQAIRYQNRFLYLHDNIYYFGNDSKAATGWATIDGNRYYFEPNTAMGANGYKTIDNKNFYFRNGLPQIGVFKGPNGFEYFAPANTDANNIDGQAIRYQNRFLHLLGKIYYFGNNSKAVTGWQTINSKVYYFMPDTAMAAAGGLFEIDGVIYFFGVDGVKAPGIYG

SEQ ID NO: 781 - protein, 2710 aa, Clostridium difficile
MSLISKEELIKLAYSIRPRENEYKTILTNLDEYNKLTTNNNENKYLQLKKLNESIDVFMNKYKNSSRNRALSNLKKDILKEVILIKNSNTSPVEKNLHFVWIGGEVSDIALEYIKQWADINAEYNVKLWYDSEAFLVNTLKKAIVESSTTEALQLLEEEIQNPQFDNTKFYKKRMEFIYDRQKRFINYYKSQINKPTVPTIDDIIKSHLVSEYNRDETLLESYRTNSLRKINSNHGIDIRANSLFTEQELLNIYSQELLNRGNLAAASDIVRLLALKNFGGVYLDVDMLPGIHSDLFKTIPRPSSIGLDRWEMIKLEAIMKYKKYINNYTSENFDKLDQQLKDNFKLIIESKSEKSEIFSKLENLNVSDLEIKIAFALGSVINQALISKQGSYLTNLVIEQVKNRYQFLNQHLNPAIESDNNFTDTTKIFHDSLFNSATAENSMFLTKIAPYLQVGFMPEARSTISLSGPGAYASAYYDFINLQENTIEKTLKASDLIEFKFPENNLSQLTEQEINSLWSFDQASAKYQFEKYVRDYTGGSLSEDNGVDFNKNTALDKNYLLNNKIPSNNVEEAGSKNYVHYIIQLQGDDISYEATCNLFSKNPKNSIIIQRNMNESAKSYFLSDDGESILELNKYRIPERLKNKEKVKVTFIGHGKDEFNTSEFARLSVDSLSNEISSFLDTIKLDISPKNVEVNLLGCNMFSYDFNVEETYPGKLLLSIMDKITSTLPDVNKDSITIGANQYEVRINSEGRKELLAHSGKWINKEEAIMSDLSSKEYIFFDSIDNKLKAKSKNIPGLASISEDIKTLLLDASVSPDTKFILNNLKLNIESSIGDYIYYEKLEPVKNIIHNSIDDLIDEFNLLENVSDELYELKKLNNLDEKYLISFEDISKNNSTYSVRFINKSNGESVYVETEKEIFSKYSEHITKEISTIKNSIITDVNGNLLDNIQLDHTSQVNTLNAAFFIQSLIDYSSNKDVLNDLSTSVKVQLYAQLFSTGLNTIYDSIQLVNLISNAVNDTINVLPTITEGIPIVSTILDGINLGAAIKELLDEHDPLLKKELEAKVGVLAINMSLSIAATVASIVGIGAEVTIFLLPIAGISAGIPSLVNNELILHDKATSVVNYFNHLSESKKYGPLKTEDDKILVPIDDLVISEIDFNNNSIKLGTCNILAMEGGSGHTVTGNIDHFFSSPYISSHIPSLSVYSAIGIKTENLDFSKKIMMLPNAPSRVFWWETGAVPGLRSLENDGTKLLDSIRDLYPGKFYWRFYAFFDYAITTLKPVYEDTNTKIKLDKDTRNFIMPTITTDEIRNKLSYSFDGAGGTYSLLLSSYPISMNINLSKDDLWIFNIDNEVREISIENGTIKKGNLIEDVLSKIDINKNKLIIGNQTIDFSGDIDNKDRYIFLTCELDDKISLIIEINLVAKSYSLLLSGDKNYLISNLSNTIEKINTLGLDSKNIAYNYTDESNNKYFGAISKTSQKSIIHYKKDSKNILEFYNGSTLEFNSKDFIAEDINVFMKDDINTITGKYYVDNNTDKSIDFSISLVSKNQVKVNGLYLNESVYSSYLDFVKNSDGHHNTSNFMNLFLNNISFWKLFGFENINFVIDKYFTLVGKTNLGYVEFICDNNKNIDIYFGEWKTSSSKSTIFSGNGRNVVVEPIYNPDTGEDISTSLDFSYEPLYGIDRYINKVLIAPDLYTSLININTNYYSNEYYPEIIVLNPNTFHKKVNINLDSSSFEYKWSTEGSDFILVRYLEESNKKILQKIRIKGILSNTQSFNKMSIYFKDIKKLSLGYIMSNFKSFNSENELDRDHLGFKIIDNKTYYYDEDSKLVKGLININNSLFYFDPIESNLVTGWQTINGKKYYFDINTGAASTSYKIINGKHFYFNNNGVMQLGVFKGPDGFEYFAPANTQNNNIEGQAIVYQSKFLTLNGKKYYFDNDSKAVTGWRIINNEKYYFNPNNAIAAVGLQVIDNNKYYFNPDTAIISKGWQTVNGSRYYFDTDTAIAFNGYKTIDGKHFYFDSDCVVKIGVFSGSNGFEYFAPANTYNNNIEGQAIVYQSKFLTLNGKKYYFDNNSKAVTGWQTIDSKKYYFNTNTAEAATGWQTIDGKKYYFNTNTAEAATGWQTIDGKKYYFNTNTSIASTGYTIINGKHFYFNTDGIMQIGVFKGPNGFEYFAPANTHNNNIEGQAILYQNKFLTLNGKKYYFGSDSKAITGWQTIDGKKYYFNPNNAIAATHLCTINNDKYYFSYDGILQNGYITIERNNFYFDANNESKMVTGVFKGPNGFEYFAPANTHNNNIEGQAIVYQNKFLTLNGKKYYFDNDSKAVTGWQTIDSKKYYFNLNTAVAVTGWQTIDGEKYYFNLNTAEAATGWQTIDGKRYYFNTNTYIASTGYTIINGKHFYFNTDGIMQIGVFKGPDGFEYFAPANTHNNNIEGQAILYQNKFLTLNGKKYYFGSDSKAVTGLRTIDGKKYYFNTNTAVAVTGWQTINGKKYYFNTNTYIASTGYTIISGKHFYFNTDGIMQIGVFKGPDGFEYFAPANTDANNIEGQAIRYQNRFLYLHDNIYYFGNDSKAATGWATIDGNRYYFEPNTAMGANGYKTIDNKNFYFRNGLPQIGVFKGPNGFEYFAPANTDANNIDGQAIRYQNRFLHLLGNIYYFGNNSKAVTGWQTINGKVYYFMPDTAMAAAGGLFEIDGVIYFFGVDGVKAPGIYG

SEQ ID NO: 782 - protein, 2710 aa, Clostridium difficile
MSLISKEELIKLAYSIRPRENEYKTILTNLDEYNKLTTNNNENKYLQLKKLNESIDVFMNKYKTSSRNRALSNLKKDILKEVILIKNSNTSPVEKNLHFVWIGGEVSDIALEYIKQWADINAEYNIKLWYDSEAFLVNTLKKAIVESSTTEALQLLEEEIQNPQFDNMKFYKKRMEFIYDRQKRFINYYKSQINKPTVPTIDDIIKSHLVSEYNRDETLLESYRTNSLRKINSNHGIDIRANSLFTEQELLNIYSQELLNRGNLAAASDIVRLLALKNFGGVYLDVDMLPGIHSDLFKTISRPSSIGLDRWEMIKLEAIMKYKKYINNYTSENFDKLDQQLKDNFKLIIESKSEKSEIFSKLENLNVSDLEIKIAFALGSVINQALISKQGSYLTNLVIEQVKNRYQFLNQHLNPAIESDNNFTDTTKIFHDSLFNSATAENSMFLTKIAPYLQVGFMPEARSTISLSGPGAYASAYYDFINLQENTIEKTLKASDLIEFKFPENNLSQLTEQEINSLWSFDQASAKYQFEKYVRDYTGGSLSEDNGVDFNKNTALDKNYLLNNKIPSNNVEEAGSKNYVHYIIQLQGDDISYEATCNLFSKNPKNSIIIQRNMNESAKSYFLSDDGESILELNKYRIPERLKNKEKVKVTFIGHGKDEFNTSEFARLSVDSLSNEISSFLDTIKLDISPKNVEVNLLGCNMFSYDFNVEETYPGKLLLSIMDKITSTLPDVNKNSITIGANQYEVRINSEGRKELLAHSGKWINKEEAIMSDLSSKEYIFFDSIDNKLKAKSKNIPGLASISEDIKTLLLDASVSPDTKFILNNLKLNIESSIGDYIYYEKLEPVKNIIHNSIDDLIDEFNLLENVSDELYELKKLNNLDEKYLISFEDISKNNSTYSVRFINKSNGESVYVETEKEIFSKYSEHITKEISTIKNSIITDVNGNLLDNIQLDHTSQVNTLNAAFFIQSLIDYSSNKDVLNDLSTSVKVQLYAQLFSTGLNTIYDSIQLVNLISNAVNDTINVLPTITEGIPIVSTILDGINLGAAIKELLDEHDPLLKKELEAKVGVLAINMSLSIAATVASIVGIGAEVTIFLLPIAGISAGIPSLVNNELILHDKATSVVNYFNHLSESKKYGPLKTEDDKILVPIDDLVISEIDFNNNSIKLGTCNILAMEGGSGHTVTGNIDHFFSSPSISSHIPSLSIYSAIGIETENLDFSKKIMMLPNAPSRVFWWETGAVPGLRSLENDGTRLLDSIRDLYPGKFYWRFYAFFDYAITTLKPVYEDTNIKIKLDKDTRNFIMPTITTNEIRNKLSYSFDGAGGTYSLLLSSYPISTNINLSKDDLWIFNIDNEVREISIENGTIKKGKLIKDVLSKIDINKNKLIIGNQTIDFSGDIDNKDRYIFLTCELDDKISLIIEINLVAKSYSLLLSGDKNYLISNLSNTIEKINTLGLDSKNIAYNYTDESNNKYFGAISKTSQKSIIHYKKDSKNILEFYNDSTLEFNSKDFIAEDINVFMKDDINTITGKYYVDNNTDKGIDFSISLVSKNQVKVNGLYLNESVYSSYLDFVKNSDGHHNTSNFMNLFLDNISFWKLFGFENINFVIDKYFTLVGKTNLGYVEFICDNNKNIDIYFGEWKTSSSKSTIFSGNGRNVVVEPIYNPDTGEDISTSLDFSYEPLYGIDRYINKVLIAPDLYTSLININTNYYSNEYYPEIIVLNPNTFHKKVNINLDSSSFEYKWSTEGSDFILVRYLEESNKKILQKIRIKGILSNTQSFNKMSIDFKDIKKLSLGYIMSNFKSFNSENELDRDHLGFKIIDNKTYYYDEDSKLVKGLININNSLFYFDPIEFNLVTGWQTINGKKYYFDINTGAASTSYKIINGKHFYFNNDGVMQLGVFKGPDGFEYFAPANTQNNNIEGQAIVYQSKFLTLNGKKYYFDNDSKAVTGWRIINNEKYYFNPNNAIAAVGLQVIDNNKYYFNPDTAIISKGWQTVNGSRYYFDTDTAIAFNGYKTIDGKHFYFDSDCVVKIGVFSTSNGFEYFAPANTYNNNIEGQAIVYQSKFLTLNGKKYYFDDNSKAVTGWQTIDSKKYYFNTNTAEAATGWQTIDGKKYYFNTNTAEAATGWQTIDGKKYYFNTNTAIASTGYTIINGKHFYFNTDGIMQIGVFKGPNGFEYFAPANTDANNIEGQAILYQNEFLTLNGKKYYFGSDSKAVTGWRIINNKKYYFNPNNAIAAIHLCTINNDKYYFSYDGILQNGYITIERNNFYFDANNESKMVTGVFKGPNGFEYFAPANTHNNNIEGQAIVYQNKFLTLNGKKYYFDNDSKAVTGWQTIDGKKYYFNLNTAEAATGWQTIDGKKYYFNLNTAEAATGWQTIDGKKYYFNTNTFIASTGYTSINGKHFYFNTDGIMQIGVFKGPNGFEYFAPANTHNNNIEGQAILYQNKFLTLNGKKYYFGSDSKAVTGLRTIDGKKYYFNTNTAVAVTGWQTINGKKYYFNTNTSIASTGYTIISGKHFYFNTDGIMQIGVFKGPDGFEYFAPANTDANNIEGQAIRYQNRFLYLHDNIYYFGNNSKAATGWVTIDGNRYYFEPNTAMGANGYKTIDNKNFYFRNGLPQIGVFKGSNGFEYFAPANTDANNIEGQAIRYQNRFLHLLGKIYYFGNNSKAVTGWQTINGKVYYFMPDTAMAAAGGLFEIDGVIYFFGVDGVKAPGIYG

SEQ ID NO: 783 - protein, 2710 aa, Clostridium difficile
MSLISKEELIKLAYSIRPRENEYKTILTNLDEYNKLTTNNNENKYLQLKKLNESIDVFMNKYKNSSRNRALSNLKKDILKEVILIKNSNTSPVEKNLHFVWIGGEVSDIALEYIKQWADINAEYNIKLWYDSEAFLVNTLKKAIVESSTTEALQLLEEEIQNPQFDNMKFYKKRMEFIYDRQKRFINYYKSQINKPTVPTIDDIIKSHLVSEYNRDETLLESYRTNSLRKINSNHGIDIRANSLFTEQELLNIYSQELLNRGNLAAASDIVRLLALKNFGGVYLDVDMLPGIHSDLFKTIPRPSSIGLDRWEMIKLEAIMKYKKYINNYTSENFDKLDQQLKDNFKLIIESKSEKSEIFSKLENLNVSDLEIKIAFALGSVINQALISKQGSYLTNLVIEQVKNRYQFLNQHLNPAIESDNNFTDTTKIFHDSLFNSATAENSMFLTKIAPYLQVGFMPEARSTISLSGPGAYASAYYDFINLQENTIEKTLKASDLIEFKFPENNLSQLTEQEINSLWSFDQASAKYQFEKYVRDYTGGSLSEDNGVDFNKNTALDKNYLLNNKIPSNNVEEAGSKNYVHYIIQLQGDDISYEATCNLFSKNPKNSIIIQRNMNESAKSYFLSDDGESILELNKYRIPERLKNKEKVKVTFIGHGKDEFNTSEFARLSVDSLSNEISSFLDTIKLDISPKNVEVNLLGCNMFSYDFNVEETYPGKLLLSIMDKITSTLPDVNKDSITIGANQYEVRINSEGRKELLAHSGKWINKEEAIMSDLSSKEYIFFDSIDNKLKAKSKNIPGLASISEDIKTLLLDASVSPDTKFILNNLKLNIESSIGDYIYYEKLEPVKNIIHNSIDDLIDEFNLLENVSDELYELKKLNNLDEKYLISFEDISKNNSTYSVRFINKSNGESVYVETEKEIFSKYSEHITKEISTIKNSIITDVNGNLLDNIQLDHTSQVNTLNAAFFIQSLIDYSSNKDVLNDLSTSVKVQLYVQLFSTGLNTIYDSIQLVNLISNAVNDTINVLPTITEGIPIVSTILDGINLGAAIKELLDEHDPLLKKELEAKVGVLAINMSLSIAATVASIVGIGAEVTIFLLPIAGISAGIPSLVNNELILHDKATSVVNYFNHLSESKEYGPLKTEDDKILVPIDDLVISEIDFNNNSIKLGTCNILAMEGGSGHTVTGNIDHFFSSPYISSHIPSLSVYSAIGIKTENLDFSKKIMMLPNAPSRVFWWETGAVPGLRSLENNGTKLLDSIRDLYPGKFYWRFYAFFDYAITTLKPVYEDTNTKIKLDKDTRNFIMPTITTDEIRNKLSYSFDGAGGTYSLLLSSYPISMNINLSKDDLWIFNIDNEVREISIENGTIKKGNLIEDVLSKIDINKNKLIIGNQTIDFSGDIDNKDRYIFLTCELDDKISLIIEINLVAKSYSLLLSGDKNYLISNLSNTIEKINTLGLDSKNIAYNYTDESNNKYFGAISKTSQKSIIHYKKDSKNILEFYNGSTLEFNSKDFIAEDINVFMKDDINTITGKYYVDNNTDKSIDFSISLVSKNQVKVNGLYLNESVYSSYLDFVKNSDGHHNTSNFMNLFLNNISFWKLFGFENINFVIDKYFTLVGKTNLGYVEFICDNNKNIDIYFGEWKTSSSKSTIFSGNGRNVVVEPIYNPDTGEDISTSLDFSYEPLYGIDRYINKVLIAPDLYTSLININTNYYSNEYYPEIIVLNPNTFHKKVNINLDSSSFEYKWSTEGSDFILVRYLEESNKKILQKIRIKGILSNTQSFNKMSIDFKDIKKLSLGYIMSNFKSFNSENELDRDHLGFKIIDNKTYYYDEDSKLVKGLININNSLFYFDPIESNLVTGWQTINGKKYYFDINTGAASTSYKIINGKHFYFNNNGVMQLGVFKGPDGFEYFAPANTQNNNIEGQAIVYQSKFLTLNGKKYYFDNDSKAVTGWRIINNEKYYFNPNNAIAAVGLQVIDNNKYYFNPDTAIISKGWQTVNGSRYYFDTDTAIAFNGYKTIDGKHFYFDSDCVVKIGVFSGSNGFEYFAPANTYNNNIEGQAIVYQSKFLTLNGKKYYFDNNSKAVTGWQTIDSKKYYFNTNTAEAATGWQTIDGKKYYFNTNTAEAATGWQTIDGKKYYFNTNTSIASTGYTIINGKYFYFNTDGIMQIGVFKVPNGFEYFAPANTHNNNIEGQAILYQNKFLTLNGKKYYFGSDSKAITGWQTIDGKKYYFNPNNAIAATHLCTINNDKYYFSYDGILQNGYITIERNNFYFDANNESKMVTGVFKGPNGFEYFAPANTHNNNIEGQAIVYQNKFLTLNGKKYYFDNDSKAVTGWQTIDSKKYYFNLNTAVAVTGWQTIDGEKYYFNLNTAEAATGWQTIDGKRYYFNTNTYIASTGYTIINGKHFYFNTDGIMQIGVFKGPDGFEYFAPANTHNNNIEGQAILYQNKFLTLNGKKYYFGSDSKAVTGLRTIDGKKYYFNTNTAVAVTGWQTINGKKYYFNTNTYIASTGYTIISGKHFYFNTDGIMQIGVFKGPDGFEYFAPANTDANNIEGQAIRYQNRFLYLHDNIYYFGNDSKAATGWATIDGNRYYFEPNTAMGANGYKTIDNKNFYFRNGLPQIGVFKGPNGFEYFAPANTDANNIDGQAIRYQNRFLHLLGKIYYFGNNSKAVTGWQTINSKVYYFMPDTAMAAAGGLFEIDGVIYFFGVDGVKAPGIYG

SEQ ID NO: 784 - protein, 2710 aa, Clostridium difficile
MSLISKEELIKLAYSIRPRENEYKTILTNLDEYNKLTTNNNENKYLQLKKLNESIDVFMNKYKTSSRNRALSNLKKDILKEVILIKNSNTSPVEKNLHFVWIGGEVSDIALEYIKQWADINAEYNIKLWYDSEAFLVNTLKKAIVESSTTEALQLLEEEIQNPQFDNMKFYKKRMEFIYDRQKRFINYYKSQINKPTVPTIDDIIKSHLVSEYNRDETVLESYRTNSLRKINSNHGIDIRANSLFTEQELLNIYSQELLNRGNLAAASDIVRLLALKNFGGVYLDVDMLPGIHSDLFKTISRPSSIGLDRWEMIKLEAIMKYKKYINNYTSENFDKLDQQLKDNFKLIIESKSEKSEIFSKLENLNVSDLEIKIAFALGSVINQALISKQGSYLTNLVIEQVKNRYQFLNQHLNPAIESDNNFTDTTKIFHDSLFNSATAENSMFLTKIAPYLQVGFMPEARSTISLSGPGAYASAYYDFINLQENTIEKTLKASDLIEFKFPENNLSQLTEQEINSLWSFDQASAKYQFEKYVRDYTGGSLSEDNGVDFNKNTALDKNYLLNNKIPSNNVEEAGSKNYVHYIIQLQGDDISYEATCNLFSKNPKNSIIIQRNMNESAKSYFLSDDGESILELNKYRIPERLKNKEKVKVTFIGHGKDEFNTSEFARLSVDSLSNEISSFLDTIKLDISPKNVEVNLLGCNMFSYDFNVEETYPGKLLLSIMDKITSTLPDVNKNSITIGANQYEVRINSEGRKELLAHSGKWINKEEAIMSDLSSKEYIFFDSIDNKLKAKSKNIPGLASISEDIKTLLLDASVSPDTKFILNNLKLNIESSIGDYIYYEKLEPVKNIIHNSIDDLIDEFNLLENVSDELYELKKLNNLDEKYLISFEDISKNNSTYSVRFINKSNGESVYVETEKEIFSKYSEHITKEISTIKNSIITDVNGNLLDNIQLDHTSQVNTLNAAFFIQSLIDYSSNKDVLNDLSTSVKVQLYAQLFSTGLNTIYDSIQLVNLISNAVNDTINVLPTITEGIPIVSTILDGINLGAAIKELLDEHDPLLKKELEAKVGVLAINMSLSIAATVASIVGIGAEVTIFLLPIAGISAGIPSLVNNELILHDKATSVVNYFNHLSESKKYGPLKTEDDKILVPIDDLVISEIDFNNNSIKLGTCNILAMEGGSGHTVTGNIDHFFSSPSISSHIPSLSIYSAIGIETENLDFSKKIMMLPNAPSRVFWWETGAVPGLRSLENDGTRLLDSIRDLYPGKFYWRFYAFFDYAITTLKPVYEDTNIKIKLDKDTRNFIMPTITTNEIRNKLSYSFDGAGGTYSLLLSSYPISTNINLSKDDLWIFNIDNEVREISIENGTIKKGKLIKDVLSKIDINKNKLIIGNQTIDFSGDIDNKDRYIFLTCELDDKISLIIEINLVAKSYSLLLSGDKNYLISNLSNTIEKINTLGLDSKNIAYNYTDESNNKYFGAISKTSQKSIIHYKKDSKNILEFYNDSTLEFNSKDFIAEDINVFMKDDINTITGKYYVDNNTDKSIDFSISLVSKNQVKVNGLYLNESVYSSYLDFVKNSDGHHNTSNFMNLFLDNISFWKLFGFENINFVIDKYFTLVGKTNLGYVEFICDNNKNIDIYFGEWKTSSSKSTIFSGNGRNVVVEPIYNPDTGEDISTSLDFSYEPLYGIDRYINKVLIAPDLYTSLININTNYYSNEYYPEIIVLNPNTFHKKVNINLDSSSFEYKWSTEGSDFILVRYLEESNKKILQKIRIKGILSNTQSFNKMSIDFKDIKKLSLGYIMSNFKSFNSENELDRDHLGFKIIDNKTYYYDEDSKLVKGLININNSLFYFDPIEFNLVTGWQTINGKKYYFDINTGAALTSYKIINGKHFYFNNDGVMQLGVFKGPDGFEYFAPANTQNNNIEGQAIVYQSKFLTLNGKKYYFDNDSKAVTGWRIINNEKYYFNPNNAIAAVGLQVIDNNKYYFNPDTAIISKGWQTVNGSRYYFDTDTAIAFNGYKTIDGKHFYFDSDCVVKIGVFSGSNGFEYFAPANTYNNNIEGQAIVYQSKFLTLNGKKYYFDNNSKAVTGWQTIDSKKYYFNTNTAEAATGWQTIDGKKYYFNTNTAEAATGWQTIDGKKYYFNTNTAIASTGYTSINGKHFYFNTDGIMQIGVFKGPNGFEYFAPANTDANNIEGQAILYQNEFLTLNGKKYYFGSDSKAVTGWRIINNKKYYFNPNNAIAAIHLCTINNDKYYFSYDGILQNGYITIERNNFYFDANNESKMVTGVFKGPNGFEYFAPANTHNNNIEGQAIVYQNKFLTLNGKKYYFDNDSKAVTGWQTIDGKKYYFNLNTAEAATGWQTIDGKKYYFNLNTAEAATGWQTIDGKKYYFNTNTFIASTGYTSINGKHFYFNTDGIMQIGVFKGPNGFEYFAPANTHNNNIEGQAILYQNKFLTLNGKKYYFGSDSKAVTGLRTIDGKKYYFNTNTAVAVTGWQTINGKKYYFNTNTSIASTGYTIISGKHFYFNTDGIMQIGVFKGPDGFEYFAPANTDANNIEGQAIRYQNRFLYLHDNIYYFGNNSKAATGWVTIDGNRYYFEPNTAMGANGYKTIDNKNFYFRNGLPQIGVFKGSNGFEYFAPANTDANNIEGQAIRYQNRFLHLLGKIYYFGNNSKAVTGWQTINGKVYYFMPDTAMAAAGGLFEIDGVIYFFGVDGVKAPGIYG

SEQ ID NO: 785 - protein, 2710 aa, Clostridium difficile
MSLISKEELIKLAYSIRPRENEYKTILTNLDEYNKLTTNNNENKYLQLKKLNESIDVFMNKYKTSSRNRALSNLKKDILKEVILIKNSNTSPVEKNLHFVWIGGEVSDIALEYIKQWADINAEYNIKLWYDSEAFLVNTLKKAIVESSTTEALQLLEEEIQNPQFDNMKFYKKRMEFIYDRQKRFINYYKSQINKPTVPTIDDIIKSHLVSEYNRDETVLESYRTNSLRKINSNHGIDIRANSLFTEQELLNIYSQELLNRGNLAAASDIVRLLALKNFGGVYLDVDMLPGIHSDLFKTISRPSSIGLDRWEMIKLEAIMKYKKYINNYTSENFDKLDQQLKDNFKLIIESKSEKSEIFSKLENLNVSDLEIKIAFALGSVINQALISKQGSYLTNLVIEQVKNRYQFLNQHLNPAIESDNNFTDTTKIFHDSLFNSATAENSMFLTKIAPYLQVGFMPEARSTISLSGPGAYASAYYDFINLQENTIEKTLKASDLIEFKFPENNLSQLTEQEINSLWSFDQASAKYQFEKYVRDYTGGSLSEDNGVDFNKNTALDKNYLLNNKIPSNNVEEAGSKNYVHYIIQLQGDDISYEATCNLFSKNPKNSIIIQRNMNESAKSYFLSDDGESILELNKYRIPERLKNKEKVKVTFIGHGKDEFNTSEFARLSVDSLSNEISSFLDTIKLDISPKNVEVNLLGCNMFSYDFNVEETYPGKLLLSIMDKITSTLPDVNKNSITIGANQYEVRINSEGRKELLAHSGKWINKEEAIMSDLSSKEYIFFDSIDNRLKAKSKNIPGLASISEDIKTLLLDASVSPDTKFILNNLKLNIESSIGDYIYYEKLEPVKNIIHNSIDDLIDEFNLLENVSDELYELKKLNNLDEKYLISFEDISKNNSTYSVRFINKSNGESVYVETEKEIFSKYSEHITKEISTIKNSIITDVNGNLLDNIQLDHTSQVNTLNAAFFIQSLIDYSSNKDVLNDLSTSVKVQLYAQLFSTGLNTIYDSIQLVNLISNAVNDTINVLPTITEGIPIVSTILDGINLGAAIKELLDEHDPLLKKELEAKVGVLAINMSLSIAATVASIVGIGAEVTIFLLPIAGISAGIPSLVNNELILHDKATSVVNYFNHLSESKKYGPLKTEDDKILVPIDDLVISEIDFNNNSIKLGTCNILAMEGGSGHTVTGNIDHFFSSPSISSHIPSLSIYSAIGIETENLDFSKKIMMLPNAPSRVFWWETGAVPGLRSLENDGTRLLDSIRDLYPGKFYWRFYAFFDYAITTLKPVYEDTNIKIKLDKDTRNFIMPTITTNEIRNKLSYSFDGAGGTYSLLLSSYPISTNINLSKDDLWIFNIDNEVREISIENGTIKKGKLIKDVLSKIDINKNKLIIGNQTIDFSGDIDNKDRYIFLTCELDDKISLIIEINLVAKSYSLLLSGDKNYLISNLSNTIEKINTLGLDSKNIAYNYTDESNNKYFGAISKTSQKSIIHYKKDSKNILEFYNDSTLEFNSKDFIAEDINVFMKDDINTITGKYYVDNNTDKSIDFSISLVSKNQVKVNGLYLNESVYSSYLDFVKNSDGHHNTSNFMNLFLDNISFWKLFGFENINFVIDKYFTLVGKTNLGYVEFICDNNKNIDIYFGEWKTSSSKSTIFSGNGRNVVVEPIYNPDTGEDISTSLDFSYEPLYGIDRYINKVLIAPDLYTSLININTNYYSNEYYPEIIVLNPNTFHKKVNINLDSSSFEYKWSTEGSDFILVRYLEESNKKILQKIRIKGILSNTQSFNKMSIDFKDIKKLSLGYIMSNFKSFNSENELDRDHLGFKIIDNKTYYYDEDSKLVKGLININNSLFYFDPIEFNLVTGWQTINGKKYYFDINTGAALTSYKIINGKHFYFNNDGVMQLGVFKGPDGFEYFAPANTQNNNIEGQAIVYQSKFLTLNGKKYYFDNNSKAVTGWRIINNEKYYFNPNNAIAAVGLQVIDNNKYYFNPDTAIISKGWQTVNGSRYYFDTDTAIAFNGYKTIDGKHFYFDSDCVVKIGVFSTSNGFEYFAPANTYNNNIEGQAIVYQSKFLTLNGKKYYFDNNSKAVTGWQTIDSKKYYFNTNTAEAATGWQTIDGKKYYFNTNTAEAATGWQTIDGKKYYFNTNTAIASTGYTIINGKHFYFNTDGIMQIGVFKGPNGFEYFAPANTDANNIEGQAILYQNEFLTLNGKKYYFGSDSKAVTGWRIINNKKYYFNPNNAIAAIHLCTINNDKYYFSYDGILQNGYITIERNNFYFDANNESKMVTGVFKGPNGFEYFAPANTHNNNIEGQAIVYQNKFLTLNGKKYYFDNDSKAVTGWQTIDGKKYYFNLNTAEAATGWQTIDGKKYYFNLNTAEAATGWQTIDGKKYYFNTNTFIASTGYTSINGKHFYFNTDGIMQIGVFKGPNGFEYFAPANTDANNIEGQAILYQNKFLTLNGKKYYFGSDSKAVTGLRTIDGKKYYFNTNTAVAVTGWQTINGKKYYFNTNTSIASTGYTIISGKHFYFNTDGIMQIGVFKGPDGFEYFAPANTDANNIEGQAIRYQNRFLYLHDNIYYFGNNSKAATGWVTIDGNRYYFEPNTAMGANGYKTIDNKNFYFRNGLPQIGVFKGSNGFEYFAPANTDANNIEGQAIRYQNRFLHLLGKIYYFGNNSKAVTGWQTINGKVYYFMPDTAMAAAGGLFEIDGVIYFFGVDGVKAPGIYG

SEQ ID NO: 786 - protein, 2710 aa, Clostridium difficile
MSLISKEELIKLAYSIRPRENEYKTILTNLDEYNKLTTNNNENKYLQLKKLNESIDVFMNKYKNSSRNRALSNLKKDILKEVILIKNSNTSPVEKNLHFVWIGGEVSDIALEYIKQWADINAEYNIKLWYDSEAFLVNTLKKAIVESSTTEALQLLEEEIQNPQFDNMKFYKKRMEFIYDRQKRFINYYKSQINKPTVPTIDDIIKSHLVSEYNRDETLLESYRTNSLRKINSNHGIDIRANSLFTEQELLNIYSQELLNRGNLAAASDIVRLLALKNFGGVYLDVDMLPGIHSDLFKTIPRPSSIGLDRWEMIKLEAIMKYKKYINNYTSENFDKLDQQLKDNFKLIIESKSEKSEIFSKLENLNVSDLEIKIAFALGSVINQALISKQGSYLTNLVIEQVKNRYQFLNQHLNPAIESDNNFTDTTKIFHDSLFNSATAENSMFLTKIAPYLQVGFMPEARSTISLSGPGAYASAYYDFINLQENTIEKTLKASDLIEFKFPENNLSQLTEQEINSLWSFDQASAKYQFEKYVRDYTGGSLSEDNGVDFNKNTALDKNYLLNNKIPSNNVEEAGSKNYVHYIIQLQGDDISYEATCNLFSKNPKNSIIIQRNMNESAKSYFLSDDGESILELNKYRIPERLKNKEKVKVTFIGHGKDEFNTSEFARLSVDSLSNEISSFLDTIKLDISPKNVEVNLLGCNMFSYDFNVEETYPGKLLLSIMDKITSTLPDVNKDSITIGANQYEVRINSEGRKELLAHSGKWINKEEAIMSDLSSKEYIFFDSIDNKLKAKSKNIPGLASISEDIKTLLLDASVSPDTKFILNNLKLNIESSIGDYIYYEKLEPVKNIIHNSIDDLIDEFNLLENVSDELYELKKLNNLDEKYLISFEDISKNNSTYSVRFINKSNGESVYVETEKEIFSKYSEHITKEISTIKNSIITDVNGNLLDNIQLDHTSQVNTLNAAFFIQSLIDYSSNKDVLNDLSTSVKVQLYAQLFSTGLNTIYDSIQLVNLISNAVNDTINVLPTITEGIPIVSTILDGINLGAAIKELLDEHDPLLKKELEAKVGVLAINMSLSIAATVASIVGIGAEVTIFLLPIAGISAGIPSLVNNELILHDKATSVVNYFNHLSESKKYGPLKTEDDKILVPIDDLVISEIDFNNNSIKLGTCNILAMEGGSGHTVTGNIDHFFSSPYISSHIPSLSVYSAIGIKTENLDFSKKIMMLPNAPSRVFWWETGAVPGLRSLENDGTKLLDSIRDLYPGKFYWRFYAFFDYAITTLKPVYEDTNTKIKLDKDTRNFIMPTITTDEIRNKLSYSFDGAGGTYSLLLSSYPISMNINLSKDDLWIFNIDNEVREISIENGTIKKGNLIEDVLSKIDINKNKLIIGNQTIDFSGDIDNKDRYIFLTCELDDKISLIIEINLVAKSYSLLLSGDKNYLISNLSNTIEKINTLGLDSKNIAYNYTDESNNKYFGAISKTSQKSIIHYKKDSKNILEFYNGSTLEFNSKDFIAEDINVFMKDDINTITGKYYVDNNTDKSIDFSISLVSKNQVKVNGLYLNESVYSSYLDFVKNSDGHHNTSNFMNLFLNNISFWKLFGFENINFVIDKYFTLVGKTNLGYVEFICDNNKNIDIYFGEWKTSSSKSTIFSGNGRNVVVEPIYNPDTGEDISTSLDFSYEPLYGIDRYINKVLIAPDLYTSLININTNYYSNEYYPEIIVLNPNTFHKKVNINLDSSSFEYKWSTEGSDFILVRYLEESNKKILQKIRIKGILSNTQSFNKMSIDFKDIKKLSLGYIMSNFKSFNSENELDRDHLGFKIIDNKTYYYDEDSKLVKGLININNSLFYFDPIESNLVTGWQTINGKKYYFDINTGAASTSYKIINGKHFYFNNNGVMQLGVFKGPDGFEYFAPANTQNNNIEGQAIVYQSKFLTLNGKKYYFDNDSKAVTGWRIINNEKYYFNPNNAIAAVGLQVIDNNKYYFNPDTAIISKGWQTVNGSRYYFDTDTAIAFNGYKTIDGKHFYFDSDCVVKIGVFSGSNGFEYFAPANTYNNNIEGQAIVYQSKFLTLNGKKYYFDNNSKAVTGWQTIDSKKYYFNTNTAEAATGWQTIDGKKYYFNTNTAEAATGWQTIDGKKYYFNTNTSIASTGYTIINGKHFYFNTDGIMQIGVFKGPNGFEYFAPANTHNNNIEGQAILYQNKFLTLNGKKYYFGSDSKAITGWQTIDGKKYYFNPNNAIAATHLCTINNDKYYFSYDGILQNGYITIERNNFYFDANNESKMVTGVFKGPNGFEYFAPANTHNNNIEGQAIVYQNKFLTLNGKKYYFDNDSKAVTGWQTIDSKKYYFNLNTAVAVTGWQTIDGEKYYFNLNTAEAATGWQTIDGKRYYFNTNTYIASTGYTIINGKHFYFNTDGIMQIGVFKGPDGFEYFAPANTHNNNIEGQAILYQNKFLTLNGKKYYFGSDSKAVTGLRTIDGKKYYFNTNTAVAVTGWQTINGKKYYFNTNTYIASTGYTIISGKHFYFNTDGIMQIGVFKGPDGFEYFAPANTDANNIEGQAIRYQNRFLYLHDNIYYFGNDSKAATGWATIDGNRYYFEPNTAMGANGYKTIDNKNFYFRNGLPQIGVFKGPNGFEYFAPANTDANNIDGQAIRYQNRFLHLLGKIYYFGNNSKAVTGWQTINSKVYYFMPDTAMAAAGGLFEIDGVIYFFGVDGVKAPGIYG

SEQ ID NO: 787 - protein, 2710 aa, Clostridium difficile
MSLISKEELIKLAYSIRPRENEYKTILTNLDEYNKLTTNNNENKYLQLKKLNESIDVFMNKYKNSSRNRALSNLKKDILKEVILIKNSNTSPVEKNLHFVWIGGEVSDIALEYIKQWADINAEYNIKLWYDSEAFLVNTLKKAIVESSTTEALQLLEEEIQNPQFDNMKFYKKRMEFIYDRQKRFINYYKSQINKPTVPTIDDIIKSHLVSEYNRDETLLESYRTNSLRKINSNHGIDIRANSLFTEQELLNIYSQELLNRGNLAAASDIVRLLALKNFGGVYLDVDMLPGIHSDLFKTIPRPSSIGLDRWEMIKLEAIMKYKKYINNYTSENFDKLDQQLKDNFKLIIESKSEKSEIFSKLENLNVSDLEIKIAFALGSVINQALISKQGSYLTNLVIEQVKNRYQFLNQHLNPAIESDNNFTDTTKIFHDSLFNSATAENSMFLTKIAPYLQVGFMPEARSTISLSGPGAYASAYYDFINLQENTIEKTLKASDLIEFKFPENNLSQLTEQEINSLWSFDQASAKYQFEKYVRDYTGGSLSEDNGVDFNKNTALDKNYLLNNKIPSNNVEEAGSKNYVHYIIQLQGDDISYEATCNLFSKNPKNSIIIQRNMNESAKSYFLSDDGESILELNKYRIPERLKNKEKVKVTFIGHGKDEFNTSEFARLSVDSLSNEISSFLDTIKLDISPKNVEVNLLGCNMFSYDFNVEETYPGKLLLSIMDKITSTLPDVNKDSITIGANQYEVRINSEGRKELLAHSGKWINKEEAIMSDLSSKEYIFFDSIDNKLKAKSKNIPGLASISEDIKTLLLDASVSPDTKFILNNLKLNIESSIGDYIYYEKLEPVKNIIHNSIDDLIDEFNLLENVSDELYELKKLNNLDEKYLISFEDISKNNSTYSVRFINKSNGESVYVETEKEIFSKYSEHITKEISTIKNSIITDVNGNLLDNIQLDHTSQVNTLNAAFFIQSLIDYSSNKDVLNDLSTSVKVQLYAQLFSTGLNTIYDSIQLVNLISNAVNDTINVLPTITEGIPIVSTILDGINLGAAIKELLDEHDPLLKKELEAKVGVLAINMSLSIAATVASIVGIGAEVTIFLLPIAGISAGIPSLVNNELILHDKATSVVNYFNHLSESKEYGPLKTEDDKILVPIDDLVISEIDFNNNSIKLGTCNILAMEGGSGHTVTGNIDHFFSSPYISSHIPSLSVYSAIGIKTENLDFSKKIMMLPNAPSRVFWWETGAVPGLRSLENNGTKLLDSIRDLYPGKFYWRFYAFFDYAITTLKPVYEDTNTKIKLDKDTRNFIMPTITTDEIRNKLSYSFDGAGGTYSLLLSSYPISMNINLSKDDLWIFNIDNEVREISIENGTIKKGNLIEDVLSKIDINKNKLIIGNQTIDFSGDIDNKDRYIFLTCELDDKISLIIEINLVAKSYSLLLSGDKNYLISNLSNTIEKINTLGLDSKNIAYNYTDESNNKYFGAISKTSQKSIIHYKKDSKNILEFYNGSTLEFNSKDFIAEDINVFMKDDINTITGKYYVDNNTDKSIDFSISLVSKNQVKVNGLYLNESVYSSYLDFVKNSDGHHNTSNFMNLFLNNISFWKLFGFENINFVIDKYFTLVGKTNLGYVEFICDNNKNIDIYFGEWKTSSSKSTIFSGNGRNVVVEPIYNPDTGEDISTSLDFSYEPLYGIDRYINKVLIAPDLYTSLININTNYYSNEYYPEIIVLNPNTFHKKVNINLDSSSFEYKWSTEGSDFILVRYLEESNKKILQKIRIKGILSNTQSFNKMSIDFKDIKKLSLGYIMSNFKSFNSENELDRDHLGFKIIDNKTYYYDEDSKLVKGLININNSLLYFDPIESNLVTGWQTINGKKYYFDINTGAASTSYKIINGKHFYFNNDGVMQLGVFKGPDGFEYFAPANTHNNNIEGQAIVYQSKFLTLNGKKYYFDNDSKAVTGWRIINNEKYYFNPNNAIAAVGLQVIDNNKYYFNPDTAIISKGWQTVNGSRYYFDTDTAIAFNGYKTIDGKHFYFDSDCVVKIGVFSGSNGFEYFAPANTYNNNIEGQAIVYQSKFLTLNGKKYYFDNNSKAVTGWQTIDSKKYYFNTNTAEAATGWQTIDGKKYYFNTNTAEAATGWQTIDGKKYYFNTNTSIASTGYTIINGKYFYFNTDGIMQIGVFKVPNGFEYFAPANTHNNNIEGQAILYQNKFLTLNGKKYYFGSDSKAITGWQTIDGKKYYFNPNNAIAATHLCTINNDKYYFSYDGILQNGYITIERNNFYFDANNESKMVTGVFKGPNGFEYFAPANTHNNNIEGQAIVYQNKFLTLNGKKYYFDNDSKAVTGWQTIDSKKYYFNLNTAVAVTGWQTIDGEKYYFNLNTAEAATGWQTIDGKRYYFNTNTYIASTGYTIINGKHFYFNTDGIMQIGVFKGPDGFEYFAPANTHNNNIEGQAILYQNKFLTLNGKKYYFGSDSKAVTGLRTIDGKKYYFNTNTAVAVTGWQTINGKKYYFNTNTYIASTGYTIISGKHFYFNTDGIMQIGVFKGPDGFEYFAPANTDANNIEGQAIRYQNRFLYLHDNIYYFGNDSKAATGWATIDGNRYYFEPNTAMGANGYKTIDNKNFYFRNGLPQIGVFKGPNGFEYFAPANTDANNIDGQAIRYQNRFLHLLGNIYYFGNNSKAVTGWQTINGKVYYFMPDTAMAAAGGLFEIDGAIYFFGVDGVKAPGIYG

SEQ ID NO: 788 - protein, 2710 aa, Clostridium difficile
MSLISKEELIKLAYSIRPRENEYKTILTNLDEYNKLTTNNNENKYLQLKKLNESIDVFMNKYKNSSRNRALSNLKKDILKEVILIKNSNTSPVEKNLHFVWIGGEVSDIALEYIKQWADINAEYNVKLWYDSEAFLVNTLKKAIVESSTTEALQLLEEEIQNPQFDNMKFYKKRMEFIYDRQKRFINYYKSQINKPTVPTIDDIIKSHLVSEYNRDETLLESYRTNSLRKINSNHGIDIRANSLFTEQELLNIYSQELLNRGNLAAASDIVRLLALKNFGGVYLDVDMLPGIHSDLFKTISRPSSIGLDRWEMIKLEAIMKYKKYINNYTSENFDKLDQQLKDNFKLIIESKSEKSEIFSKLENLNVSDLEIKIAFALGSVINQALISKQGSYLTNLVIEQVKNRYQFLNQHLNPAIESDNNFTDTTKIFHDSLFNSATAENSMFLTKIAPYLQVGFMPEARSTISLSGPGAYASAYYDFINLQENTIEKTLKASDLIEFKFPENNLSQLTEQEINSLWSFDQASAKYQFEKYVRDYTGGSLSEDNGVDFNKNTALDKNYLLNNKIPSNNVEEAGSKNYVHYIIQLQGDDISYEATCNLFSKNPKNSIIIQRNMNESAKSYFLSDDGESILELNKYRIPERLKNKEKVKVTFIGHGKDEFNTSEFARLSVDSLSNEISSFLDTIKLDISPKNVEVNLLGCNMFSYDFNVEETYPGKLLLSIMDKITSTLPDVNKDSITIGANQYEVRINSEGRKELLAHSGKWINKEEAIMSDLSSKEYIFFDSIDNKLKAKSKNIPGLASISEDIKTLLLDASVSPDTKFILNNLKLNIESSIGDYIYYEKLEPVKNIIHNSIDDLIDEFNLLENVSDELYELKKLNNLDEKYLISFEDISKNNSTYSVRFINKSNGESVYVETEKEIFSKYSEHITKEISTIKNSIITDVNGNLLDNIQLDHTSQVNTLNAAFFIQSLIDYSSNKDVLNDLSTSVKVQLYAQLFSTGLNTIYDSIQLVNLISNAVNDTINVLPTITEGIPIVSTILDGINLGAAIKELLDEHDPLLKKELEAKVGVLAINMSLSIAATVASIVGIGAEVTIFLLPIAGISAGIPSLVNNELILHDKATSVVNYFNHLSESKKYGPLKTEDDKILVPIDDLVISEIDFNNNSIKLGTCNILAMEGGSGHTVTGNIDHFFSSPYISSHIPSLSVYSAIGIKTENLDFSKKIMMLPNAPSRVFWWETGAVPGLRSLENDGTKLLDSIRDLYPGKFYWRFYAFFDYAITTLKPVYEDTNIKIKLDKDTRNFIMPTITTDEIRNKLSYSFDGAGGTYSLLLSSYPISMNINLSKDDLWIFNIDNEVREISIENGTIKKGNLIEDVLSKIDINKNKLIIGNQTIDFSGDIDNKDRYIFLTCELDDKISLIIEINLVAKSYSLLLSGDKNYLISNLSNTIEKINTLGLDSKNIAYNYTDESNNKYFGAISKTSQKSIIHYKKDSKNILEFYNGSTLEFNSKDFIAEDINVFMKDDINTITGKYYVDNNTDKSIDFSISLVSKNQVKVNGLYLNESVYSSYLDFVKNSDGHHNTSNFMNLFLNNISFWKLFGFENINFVIDKYFTLVGKTNLGYVEFICDNNKNIDIYFGEWKTSSSKSTIFSGNGRNVVVEPIYNPDTGEDISTSLDFSYEPLYGIDRYINKVLIAPDLYTSLININTNYYSNEYYPEIIVLNPNTFHKKVNINLDSSSFEYKWSTEGSDFILVRYLEESNKKILQKIRIKGILSNTQSFNKMSIDFKDIKKLSLGYIMSNFKSFNSENELDRDHLGFKIIDNKTYYYDEDSKLVKGLININNSLLYFDPIESNLVTGWQTINGKKYYFDINTGAASTSYKIINGKHFYFNNDGVMQLGVFKGPDGFEYFAPANTHNNNIEGQAIVYQSKFLTLNGKKYYFDNDSKAVTGWRIINNEKYYFNPNNAIAAVGLQVIDNNKYYFNPDTAIISKGWQTVNGSRYYFDTDTAIAFNGYKTIDGKHFYFDSDCVVKIGVFSGSNGFEYFAPANTYNNNIEGQAIVYQSKFLTLNGKKYYFDNNSKAVTGWQTIDSKKYYFNTNTAEAATGWQTIDGKKYYFNTNTAEAATGWQTIDGKKYYFNTNTSIASTGYTIINGKYFYFNTDGIMQIGVFKVPNGFEYFAPANTHNNNIEGQAILYQNKFLTLNGKKYYFGSDSKAITGWQTIDGKKYYFNPNNAIAATHLCTINNDKYYFSYDGILQNGYITIERNNFYFDANNESKMVTGVFKGPNGFEYFAPANTHNNNIEGQAIVYQNKFLTLNGKKYYFDNDSKAVTGWQTIDSKKYYFNLNTAVAVTGWQTIDGEKYYFNLNTAEAATGWQTIDGKRYYFNTNTYIASTGYTIINGKHFYFNTDGIMQIGVFKGPDGFEYFAPANTHNNNIEGQAILYQNKFLTLNGKKYYFGSDSKAVTGLRTIDGKKYYFNTNTAVAVTGWQTINGKKYYFNTNTYIASTGYTIISGKHFYFNTDGIMQIGVFKGPDGFEYFAPANTDANNIEGQAIRYQNRFLYLHDNIYYFGNDSKAATGWATIDGNRYYFEPNTAMGANGYKTIDNKNFYFRNGLPQIGVFKGPNGFEYFAPANTDANNIDGQAIRYQNRFLHLLGNIYYFGNNSKAVTGWQTINGKVYYFMPDTAMAAAGGLFEIDGAIYFFGVDGVKAPGIYG

SEQ ID NO: 789 - protein, 2710 aa, Clostridium difficile
MSLISKEELIKLAYSIRPRENEYKTILTNLDEYNKLTTNNNENKYLQLKKLNESIDVFMNKYKNSSRNRALSNLKKDILKEVILIKNSNTSPVEKNLHFVWIGGEVSDIALEYIKQWADINAEYNIKLWYDSEAFLVNTLKKAIVESSTTEALQLLEEEIQNPQFDNTKFYKKRMEFIYDRQKRFINYYKSQINKPTVPTIDDIIKSHLVSEYNRDETLLESYRTNSLRKINSNHGIDIRANSLFTEQELLNIYSQELLNRGNLAAASDIVRLLALKNFGGVYLDVDMLPGIHSDLFKTIPRPSSIGLDRWEMIKLEAIMKYKKYINNYTSENFDKLDQQLKDNFKLIIESKSEKSEIFSKLENLNVSDLEIKIAFALGSVINQALISKQGSYLTNLVIEQVKNRYQFLNQHLNPAIESDNNFTDTTKIFHDSLFNSATAENSMFLTKIAPYLQVGFMPEARSTISLSGPGAYASAYYDFINLQENTIEKTLKASDLIEFKFPENNLSQLTEQEINSLWSFDQASAKYQFEKYVRDYTGGSLSEDNGVDFNKNTALDKNYLLNNKIPSNNVEEAGSKNYVHYIIQLQGDDISYEATCNLFSKNPKNSIIIQRNMNESAKSYFLSDDGESILELNKYRIPERLKNKEKVKVTFIGHGKDEFNTSEFARLSVDSLSNEISSFLDTIKLDISPKNVEVNLLGCNMFSYDFNVEETYPGKLLLSIMDKITSTLPDVNKDSITIGANQYEVRINSEGRKELLAHSGKWINKEEAIMSDLSSKEYIFFDSIDNKLKAKSKNIPGLASISEDIKTLLLDASVSPDTKFILNNLKLNIESSIGDYIYYEKLEPVKNIIHNSIDDLIDEFNLLENVSDELYELKKLNNLDEKYLISFEDISKNNSTYSVRFINKSNGESVYVETEKEIFSKYSEHITKEISTIKNSIITDVNGNLLDNIQLDHTSQVNTLNAAFFIQSLIDYSSNKDVLNDLSTSVKVQLYAQLFSTGLNTIYDSIQLVNLISNAVNDTINVLPTITEGIPIVSTILDGINLGAAIKELLDEHDPLLKKELEAKVGVLAINMSLSIAATVASIVGIGAEVTIFLLPIAGISAGIPSLVNNELILHDKATSVVNYFNHLSESKKYGPLKTEDDKILVPIDDLVISEIDFNNNSIKLGTCNILAMEGGSGHTVTGNIDHFFSSPYISSHIPSLSVYSAIGIKTENLDFSKKIMMLPNAPSRVFWWETGAVPGLRSLENDGTKLLDSIRDLYPGKFYWRFYAFFDYAITTLKPVYEDTNTKIKLDKDTRNFIMPTITTDEIRNKLSYSFDGAGGTYSLLLSSYPISMNINLSKDDLWIFNIDNEVREISIENGTIKKGNLIEDVLSKIDINKNKLIIGNQTIDFSGDIDNKDRYIFLTCELDDKISLIIEINLVAKSYSLLLSGDKNYLISNLSNTIEKINTLGLDSKNIAYNYTDESNNKYFGAISKTSQKSIIHYKKDSKNILEFYNGSTLEFNSKDFIAEDINVFMKDDINTITGKYYVDNNTDKSIDFSISLVSKNQVKVNGLYLNESVYSSYLDFVKNSDGHHNTSNFMNLFLNNISFWKLFGFENINFVIDKYFTLVGKTNLGYVEFICDNNKNIDIYFGEWKTSSSKSTIFSGNGRNVVVEPIYNPDTGEDISTSLDFSYEPLYGIDRYINKVLIAPDLYTSLININTNYYSNEYYPEIIVLNPNTFHKKVNINLDSSSFEYKWSTEGSDFILVRYLEESNKKILQKIRIKGILSNTQSFNKMSIDFKDIKKLSLGYIMSNFKSFNSENELDRDHLGFKIIDNKTYYYDEDSKLVKGLININNSLFYFDPIESNLVTGWQTINGKKYYFDINTGAASTSYKIINGKHFYFNNDGVMQLGVFKGPDGFEYFAPANTQNNNIEGQAIVYQSKFLTLNGKKYYFDNDSKAVTGWRIINNEKYYFNPNNAIAAVGLQVIDNNKYYFNPDTAIISKGWQTVNGSRYYFDTDTAIAFNGYKTIDGKHFYFDSDCVVKIGVFSGSNGFEYFAPANTYNNNIEGQAIVYQSKFLTLNGKKYYFDNNSKAVTGWQTIDSKKYYFNTNTAEAATGWQTIDGKKYYFNTNTAEAATGWQTIDGKKYYFNTNTSIASTGYTIINGKHFYFNTDGIMQIGVFKGPNGFEYFAPANTHNNNIEGQAILYQNKFLTLNGKKYYFGSDSKAITGWQTIDGKKYYFNPNNAIAATHLCTINNDKYYFSYDGILQNGYITIERNNFYFDANNESKMVTGVFKGPNGFEYFAPANTHNNNIEGQAIVYQNKFLTLNGKKYYFDNDSKAVTGWQTIDSKKYYFNLNTAVAVTGWQTIDGEKYYFNLNTAEAATGWQTIDGKRYYFNTNTYIASTGYTIINGKHFYFNTDGIMQIGVFKGPDGFEYFAPANTHNNNIEGQAILYQNKFLTLNGKKYYFGSDSKAVTGLRTIDGKKYYFNTNTAVAVTGWQTINGKKYYFNTNTYIASTGYTIISGKHFYFNTDGIMQIGVFKGPDGFEYFAPANTDANNIEGQAIRYQNRFLYLHDNIYYFGNDSKAATGWATIDGNRYYFEPNTAMGANGYKTIDNKNFYFRNGLPQIGVFKGPNGFEYFAPANTDANNIDGQAIRYQNRFLHLLGNIYYFGNNSKAVTGWQTINGKVYYFMPDTAMAAAGGLFEIDGVIYFFGVDGVKAPGIYG

SEQ ID NO: 790 - protein, 2710 aa, Clostridium difficile
MSLISKEELIKLAYSIRPRENEYKTILTNLDEYNKLTTNNNENKYLQLKKLNESIDVFMNKYKTSSRNRALSNLKKDILKEVILIKNSNTSPVEKNLHFVWIGGEVSDIALEYIKQWADINAEYNIKLWYDSEAFLVNTLKKAIVESSTTEALQLLEEEIQNPQFDNMKFYKKRMEFIYDRQKRFINYYKSQINKPTVPTIDDIIKSHLVSEYNRDETVLESYRTNSLRKINSNHGIDIRANSLFTEQELLNIYSQELLNRGNLAAASDIVRLLALKNFGGVYLDVDMLPGIHSDLFKTISRPSSIGLDRWEMIKLEAIMKYKKYINNYTSENFDKLDQQLKDNFKLIIESKSEKSEIFSKLENLNVSDLEIKIAFALGSVINQALISKQGSYLTNLVIEQVKNRYQFLNQHLNPAIESDNNFTDTTKIFHDSLFNSATAENSMFLTKIAPYLQVGFMPEARSTISLSGPGAYASAYYDFINLQENTIEKTLKASDLIEFKFPENNLSQLTEQEINSLWSFDQASAKYQFEKYVRDYTGGSLSEDNGVDFNKNTALDKNYLLNNKIPSNNVEEAGSKNYVHYIIQLQGDDISYEATCNLFSKNPKNSIIIQRNMNESAKSYFLSDDGESILELNKYRIPERLKNKEKVKVTFIGHGKDEFNTSEFARLSVDSLSNEISSFLDTIKLDISPKNVEVNLLGCNMFSYDFNVEETYPGKLLLSIMDKITSTLPDVNKNSITIGANQYEVRINSEGRKELLAHSGKWINKEEAIMSDLSSKEYIFFDSIDNKLKAKSKNIPGLASISEDIKTLLLDASVSPDTKFILNNLKLNIESSIGDYIYYEKLEPVKNIIHNSIDDLIDEFNLLENVSDELYELKKLNNLDEKYLISFEDISKNNSTYSVRFINKSNGESVYVETEKEIFSKYSEHITKEISTIKNSIITDVNGNLLDNIQLDHTSQVNTLNAAFFIQSLIDYSSNKDVLNDLSTSVKVQLYAQLFSTGLNTIYDSIQLVNLISNAVNDTINVLPTITEGIPIVSTILDGINLGAAIKELLDEHDPLLKKELEAKVGVLAINMSLSIAATVASIVGIGAEVTIFLLPIAGISAGIPSLVNNELILHDKATSVVNYFNHLSESKKYGPLKTEDDKILVPIDDLVISEIDFNNNSIKLGTCNILAMEGGSGHTVTGNIDHFFSSPSISSHIPSLSIYSAIGIETENLDFSKKIMMLPNAPSRVFWWETGAVPGLRSLENDGTRLLDSIRDLYPGKFYWRFYAFFDYAITTLKPVYEDTNIKIKLDKDTRNFIMPTITTNEIRNKLSYSFDGAGGTYSLLLSSYPISTNINLSKDDLWIFNIDNEVREISIENGTIKKGKLIKDVLSKIDINKNKLIIGNQTIDFSGDIDNKDRYIFLTCELDDKISLIIEINLVAKSYSLLLSGDKNYLISNLSNTIEKINTLGLDSKNIAYNYTDESNNKYFGAISKTSQKSIIHYKKDSKNILEFYNDSTLEFNSKDFIAEDINVFMKDDINTITGKYYVDNNTDKSIDFSISLVSKNQVKVNGLYLNESVYSSYLDFVKNSDGHHNTSNFMNLFLDNISFWKLFGFENINFVIDKYFTLVGKTNLGYVEFICDNNKNIDIYFGEWKTSSSKSTIFSGNGRNVVVEPIYNPDTGEDISTSLDFSYEPLYGIDRYINKVLIAPDLYTSLININTNYYSNEYYPEIIVLNPNTFHKKVNINLDSSSFEYKWSTEGSDFILVRYLEESNKKILQKIRIKGILSNTQSFNKMSIDFKDIKKLSLGYIMSNFKSFNSENELDRDHLGFKIIDNKTYYYDEDSKLVKGLININNSLFYFDPIEFNLVTGWQTINGKKYYFDINTGAALTSYKIINGKHFYFNNDGVMQLGVFKGPDGFEYFAPANTQNNNIEGQAIVYQSKFLTLNGKKYYFDNDSKAVTGWRIINNEKYYFNPNNAIAAVGLQVIDNNKYYFNPDTAIISKGWQTVNGSRYYFDTDTAIAFNGYKTIDGKHFYFDSDCVVKIGVFSTSNGFEYFAPANTYNNNIEGQAIVYQSKFLTLNGKKYYFDDNSKAVTGWQTIDSKKYYFNTNTAEAATGWQTIDGKKYYFNTNTAEAATGWQTIDGKKYYFNTNTAIASTGYTIINGKHFYFNTDGIMQIGVFKGPNGFEYFAPANTDANNIEGQAILYQNEFLTLNGKKYYFGSDSKAVTGWRIINNKKYYFNPNNAIAAIHLCTINNDKYYFSYDGILQNGYITIERNNFYFDANNESKMVTGVFKGPNGFEYFAPANTYNNNIEGQAIVYQNKFLTLNGKKYYFDNDSKAVTGWQTIDGKKYYFNLNTAEAATGWQTIDGKKYYFNLNTAEAATGWQTIDGKKYYFNTNTFIASTGYTSINGKHFYFNTDGIMQIGVFKGPNGFEYFAPANTDANNIEGQAILYQNKFLTLNGKKYYFGSDSKAVTGLRTIDGKKYYFNTNTAVAVTGWQTINGKKYYFNTNTSIASTGYTIISGKHFYFNTDGIMQIGVFKGPDGFEYFAPANTDANNIEGQAIRYQNRFLYLHDNIYYFGNNSKAATGWVTIDGNRYYFEPNTAMGANGYKTIDNKNFYFRNGLPQIGVFKGSNGFEYFAPANTDANNIEGQAIRYQNRFLHLLGKIYYFGNNSKAVTGWQTINGKVYYFMPDTAMAAAGGLFEIDGVIYFFGVDGVKAPGIYG

SEQ ID NO: 791 - protein, 2710 aa, Clostridium difficile
MSLISKEELIKLAYSIRPRENEYKTILTNLDEYNKLTTNNNENKYLQLKKLNESIDVFMNKYKTSSRNRALSNLKKDILKEVILIKNSNTSPVEKNLHFVWIGGEVSDIALEYIKQWADINAEYNIKLWYDSEAFLVNTLKKAIVESSTTEALQLLEEEIQNPQFDNMKFYKKRMEFIYDRQKRFINYYKSQINKPTVPTIDDIIKSHLVSEYNRDETVLESYRTNSLRKINSNHGIDIRANSLFTEQELLNIYSQELLNRGNLAAASDIVRLLALKNFGGVYLDVDMLPGIHSDLFKTISRPSSIGLDRWEMIKLEAIMKYKKYINNYTSENFDKLDQQLKDNFKLIIESKSEKSEIFSKLENLNVSDLEIKIAFALGSVINQALISKQGSYLTNLVIEQVKNRYQFLNQHLNPAIESDNNFTDTTKIFHDSLFNSATAENSMFLTKIAPYLQVGFMPEARSTISLSGPGAYASAYYDFINLQENTIEKTLKASDLIEFKFPENNLSQLTEQEINSLWSFDQASAKYQFEKYVRDYTGGSLSEDNGVDFNKNTALYKNYLLNNKIPSNNVEEAGSKNYVHYIIQLQGDDISYEATCNLFSKNPKNSIIIQRNMNESAKSYFLSDDGESILELNKYRIPERLKNKEKVKVTFIGHGKDEFNTSEFARLSVDSLSNEISSFLDTIKLDISPKNVEVNLLGCNMFSYDFNVEETYPGKLLLSIMDKITSTLPDVNKNSITIGANQYEVRINSEGRKELLAHSGKWINKEEAIMSDLSSKEYIFFDSIDNKLKAKSKNIPGLASISEDIKTLLLDASVSPDTKFILNNLKLNIESSIGDYIYYEKLEPVKNIIHNSIDDLIDEFNLLENVSDELYELKKLNNLDEKYLISFEDISKNNSTYSVRFINKSNGESVYVETEKEIFSKYSEHITKEISTIKNSIITDVNGNLLDNIQLDHTSQVNTLNAAFFIQSLIDYSSNKDVLNDLSTSVKVQLYAQLFSTGLNTIYDSIQLVNLISNAVNDTINVLPTITEGIPIVSTILDGINLGAAIKELLDEHDPLLKKELEAKVGVLAINMSLSIAATVASIVGIGAEVTIFLLPIAGISAGIPSLVNNELILHDKATSVVNYFNHLSESKKYGPLKTEDDKILVPIDDLVISEIDFNNNSIKLGTCNILAMEGGSGHTVTGNIDHFFSSPSISSHIPSLSIYSAIGIETENLDFSKKIMMLPNAPSRVFWWETGSVPGLRSLENDGTRLLDSIRDLYPGKFYWRFYAFFDYAITTLKPVYEDTNIKIKLDKDTRNFIMPTITTNEIRNKLSYSFDGAGGTYSLLLSSYPISTNINLSKDDLWIFNIDNEVREISIENGTIKKGKLIKDVLSKIDINKNKLIIGNQTIDFSGDIDNKDRYIFLTCELDDKISLIIEINLVAKSYSLLLSGDKNYLISNLSNTIEKINTLGLDSKNIAYNYTDESNNKYFGAISKTSQKSIIHYKKDSKNILEFYNDSTLEFNSKDFIAEDINVFMKDDINTITGKYYVDNNTDKSIDFSISLVSKNQVKVNGLYLNESVYSSYLDFVKNSDGHHNTSNFMNLFLDNISFWKLFGFENINFVIDKYFTLVGKTNLGYVEFICDNNKNIDIYFGEWKTSSSKSTIFSGNGRNVVVEPIYNPDTGEDISTSLDFSYEPLYGIDRYINKVLIAPDLYTSLININTNYYSNEYYPEIIVLNPNTFHKKVNINLDSSSFEYKWSTEGSDFILVRYLEESNKKILQKIRIKGILSNTQSFNKMSIDFKDIKKLSLGYIMSNFKSFNSENELDRDHLGFKIIDNKTYYYDEDSKLVKGLININNSLFYFDPIEFNLVTGWQTINGKKYYFDINTGAALTSYKIINGKHFYFNNDGVMQLGVFKGPDGFEYFAPANTQNNNIEGQAIVYQSKFLTLNGKKYYFDNNSKAVTGWRIINNEKYYFNPNNAIAAVGLQVIDNNKYYFNPDTAIISKGWQTVNGSRYYFDTDTAIAFNGYKTIDGKHFYFDSDCVVKIGVFSTSNGFEYFAPANTYNNNIEGQAIVYQSKFLTLNGKKYYFDNNSKAVTGWQTIDSKKYYFNTNTAEAATGWQTIDGKKYYFNTNTAEAATGWQTIDGKKYYFNTNTAIASTGYTIINGKHFYFNTDGIMQIGVFKGPNGFEYFAPANTDANNIEGQAILYQNEFLTLNGKKYYFGSDSKAVTGWRIINNKKYYFNPNNAIAAIHLCTINNDKYYFSYDGILQNGYITIERNNFYFDANNESKMVTGVFKGPNGFEYFAPANTHNNNIEGQAIVYQNKFLTLNGKKYYFDNDSKAVTGWQTIDGKKYYFNLNTAEVATGWQTIDGKKYYFNLNTAEAATGWQTIDGKKYYFNTNTFIASTGYTSINGKHFYFNTDGIMQIGVFKGPNGFEYFAPANTDANNIEGQAILYQNKFLTLNGKKYYFGSDSKAVTGLRTIDGKKYYFNTNTAVAVTGWQTINGKKYYFNTNTSIASTGYTIISGKHFYFNTDGIMQIGVFKGPDGFEYFAPANTDANNIEGQAIRYQNRFLYLHDNIYYFGNNSKAATGWVTIDGNRYYFEPNTAMGANGYKTIDNKNFYFRNGLPQIGVFKGSNGFEYFAPANTDANNIEGQAIRYQNRFLHLLGKIYYFGNNSKAVTGWQTINGKVYYFMPDTAMAAAGGLFEIDGVIYFFGVDGVKAPGIYG

SEQ ID NO: 792 - protein, 2710 aa, Clostridium difficile
MSLISKEELIKLAYSIRPRENEYKTILTNLDEYNKLTTNNNENKYLQLKKLNESIDVFMNKYKNSSRNRALSNLKKDILKEVILIKNSNTSPVEKNLHFVWIGGEVSDIALEYIKQWADINAEYNIKLWYDSEAFLVNTLKKAIVESSTTEALQLLEEEIQNPQFDNMKFYKKRMEFIYDRQKRFINYYKSQINKPTVPTIDDIIKSHLVSEYNRDETLLESYRTNSLRKINSNHGIDIRANGLFTEQELLNIYSQELLNRGNLAAASDIVRLLALKNFGGVYLDVDMLPGIHSDLFKTISRPSSIGLDRWEMIKLEAIMKYKKYINNYTSENFDKLDQQLKDNFKLIIESKSEKSEIFSKLENLNVSDLEIKIAFALGSVINQALISKQGSYLTNLVIEQVKNRYQFLNQHLNPAIESDNNFTDTTKIFHDSLFNSATAENSMFLTKIAPYLQVGFMPEARSTISLSGPGAYASAYYDFINLQENTIEKTLKASDLIEFKFPENNLSQLTEQEINSLWSFDQASAKYQFEKYVRDYTGGSLSEDNGVDFNKNTALDKNYLLNNKIPSNNVEEAGSKNYVHYIIQLQGDDISYEATCNLFSKNPKNSIIIQRNMNESAKSYFLSDDGESILELNKYRIPERLKNKEKVKVTFIGHGKDEFNTSEFARLSVDSLSNEISSFLDTIKLDISPKNVEVNLLGCNMFSYDFNVEETYPGKLLLSIMDKITSTLPDVNKNSITIGANQYEVRINSEGRKELLAHSGKWINKEEAIMSDLSSKEYIFFDSIDNKLKAKSKNIPGLASISEDIKTLLLDASVSPDTKFILNNLKLNIESSIGDYIYYEKLEPVKNIIHNSIDDLIDEFNLLENVSDELYELKKLNNLDEKYLISFEDISKNNSTYSVRFINKSNGESVYVETEKEIFSKYSEHITKEISTIKNSIITDVNGNLLDNIQLDHTSQVNTLNAAFFIQSLIDYSSNKDVLNDLSTSVKVQLYAQLFSTGLNTIYDSIQLVNLISNAVNDTINVLPTITEGIPIVSTILDGINLGAAIKELLDEHDPLLKKELEAKVGVLAINMSLSIAATVASIVGIGAEVTIFLLPIAGISAGIPSLVNNELILHDKATSVVNYFNHLSESKKYGPLKTEDDKILVPIDDLVISEIDFNNNSIKLGTCNILAMEGGSGHTVTGNIDHFFSSPSISSHIPSLSIYSAIGIETENLDFSKKIMMLPNAPSRVFWWETGAVPGLRSLENDGTRLLDSIRDLYPGKFYWRFYAFFDYAITTLKPVYEDTNIKIKLDKDTRNFIMPTITTNEIRNKLSYSFDGAGGTYSLLLSSYPISTNINLSKDDLWIFNIDNEVREISIENGTIKKGKLIKDVLSKIDINKNKLIIGNQTIDFSGDIDNKDRYIFLTCELDDKISLIIEINLVAKSYSLLLSGDKNYLISNLSNTIEKINTLGLDSKNIAYNYTDESNNKYFGAISKTSQKSIIHYKKDSKNILEFYNDSTLEFNSKDFIAEDINVFMKDDINTITGKYYVDNNTDKSIDFSISLVSKNQVKVNGLYLNESVYSSYLDFVKNSDGHHNTSNFMNLFLDNISFWKLFGFENINFVIDKYFTLVGKTNLGYVEFICDNNKNIDIYFGEWKTSSSKSTIFSGNGRNVVVEPIYNPDTGEDISTSLDFSYEPLYGIDRYINKVLIAPDLYTSLININTNYYSNEYYPEIIVLNPNTFHKKVNINLDSSSFEYKWSTEGSDFILVRYLEESNKKILQKIRIKGILSNTQSFNKMSIDFKDIKKLSLGYIMSNFKSFNSENELDRDHLGFKIIDNKTYYYDEDSKLVKGLININNSLFYFDPIEFNLVTGWQTINGKKYYFDINTGAALTSYKIINGKHFYFNNDGVMQLGVFKGPDGFEYFAPANTQNNNIEGQAIVYQSKFLTLNGKKYYFDNNSKAVTGWRIINNEKYYFNPNNAIAAVGLQVIDNNKYYFNPDTAIISKGWQTVNGSRYYFDTDTAIAFNGYKTIDGKHFYFDSDCVVKIGVFSTSNGFEYFAPANTYNNNIEGQAIVYQSKFLTLNGKKYYFDNNSKAVTGWQTIDSKKYYFNTNTAEAATGWQTIDGKKYYFNTNTAEAATGWQTIDGKKYYFNTNTAIASTGYTIINGKHFYFNTDGIMQIGVFKGPNGFEYFAPANTDANNIEGQAILYQNEFLTLNGKKYYFGSDSKAVTGWRIINNKKYYFNPNNAIAAIHLCTINNDKYYFSYDGILQNGYITIERNNFYFDANNESKMVTGVFKGPNGFEYFAPANTHNNNIEGQAIVYQNKFLTLNGKKYYFDNDSKAVTGWQTIDGKKYYFNLNTAEAATGWQTIDGKKYYFNLNTAEAATGWQTIDGKKYYFNTNTFIASTGYTSINGKHFYFNTDGIMQIGVFKGPNGFEYFAPANTDANNIEGQAILYQNKFLTLNGKKYYFGSDSKAVTGLRTIDGKKYYFNTNTAVAVTGWQTINGKKYYFNTNTSIASTGYTIISGKHFYFNTDGIMQIGVFKGPDGFEYFAPANTDANNIEGQAIRYQNRFLYLHDNIYYFGNNSKAATGWVTIDGNRYYFEPNTAMGANGYKTIDNKNFYFRNGLPQIGVFKGSNGFEYFAPANTDANNIEGQAIRYQNRFLHLLGKIYYFGNNSKAVTGWQTINGKVYYFMPDTAMAAAGGLFEIDGVIYFFGVDGVKAPGIYG

SEQ ID NO: 793 - protein, 2710 aa, Clostridium difficile
MSLISKEELIKLAYSIRPRENEYKTILTNLDEYNKLTTNNNENKYLQLKKLNESIDVFMNKYKTSSRNRALSNLKKDILKEVILIKNSNTSPVEKNLHFVWIGGEVSDIALEYIKQWADINAEYNIKLWYDSEAFLVNTLKKAIVESSTTEALQLLEEEIQNPQFDNMKFYKKRMEFIYDRQKRFINYYKSQINKPTVPTIDDIIKSHLVSEYNRDETLLESYRTNSLRKINSNHGIDIRANSLFTEQELLNIYSQELLNRGNLAAASDIVRLLALKNFGGVYLDVDMLPGIHSDLFKTISRPSSIGLDRWEMIKLEAIMKYKKYINNYTSENFDKLDQQLKDNFKLIIESKSEKSEIFSKLENLNVSDLEIKIAFALGSVINQALISKQGSYLTNLVIEQVKNRYQFLNQHLNPAIESDNNFTDTTKIFHDSLFNSATAENSMFLTKIAPYLQVGFMPEARSTISLSGPGAYASAYYDFINLQENTIEKTLKASDLIEFKFPENNLSQLTEQEINSLWSFDQASAKYQFEKYVRDYTGGSLSEDNGVDFNKNTALDKNYLLNNKIPSNNVEEAGSKNYVHYIIQLQGDDISYEATCNLFSKNPKNSIIIQRNMNESAKSYFLSDDGESILELNKYRIPERLKNKEKVKVTFIGHGKDEFNTSEFARLSVDSLSNEISSFLDTIKLDISPKNVEVNLLGCNMFSYDFNVEETYPGKLLLSIMDKITSTLPDVNKNSITIGANQYEVRINSEGRKELLAHSGKWINKEEAIMSDLSSKEYIFFDSIDNKLKAKSKNIPGLASISEDIKTLLLDASVSPDTKFILNNLKLNIESSIGDYIYYEKLEPVKNIIHNSIDDLIDEFNLLENVSDELYELKKLNNLDEKYLISFEDISKNNSTYSVRFINKSNGESVYVETEKEIFSKYSEHITKEISTIKNSIITDVNGNLLDNIQLDHTSQVNTLNAAFFIQSLIDYSSNKDVLNDLSTSVKVQLYAQLFSTGLNTIYDSIQLVNLISNAVNDTINVLPTITEGIPIVSTILDGINLGAAIKELLDEHDPLLKKELEAKVGVLAINMSLSIAATVASIVGIGAEVTIFLLPIAGISAGIPSLVNNELILHDKATSVVNYFNHLSESKKYGPLKTEDDKILVPIDDLVISEIDFNNNSIKLGTCNILAMEGGSGHTVTGNIDHFFSSPSISSHIPSLSIYSAIGIETENLDFSKKIMMLPNAPSRVFWWETGAVPGLRSLENDGTRLLDSIRDLYPGKFYWRFYAFFDYAITTLKPVYEDTNIKIKLDKDTRNFIMPTITTNEIRNKLSYSFDGAGGTYSLLLSSYPISTNINLSKDDLWIFNIDNEVREISIENGTIKKGKLIKDVLSKIDINKNKLIIGNQTIDFSGDIDNKDRYIFLTCELDDKISLIIEINLVAKSYSLLLSGNKNYLISNLSNTIEKINTLGLDSKNIAYNYTDESNNKYFGAISKTSQKSIIHYKKDSKNILEFYNDSTLEFNSKDFIAEDINVFMKDDINTITGKYYVDNNTDKGIDFSISLVSKNQVKVNGLYLNESVYSSYLDFVKNSDGHHNTSNFMNLFLDNISFWKLFGFENINFVIDKYFTLVGKTNLGYVEFICDNNKNIDIYFGEWKTSSSKSTIFSGNGRNVVVEPIYNPDTGEDISTSLDFSYEPLYGIDRYINKVLIAPDLYTSLININTNYYSNEYYPEIIVLNPNTFHKKVNINLDSSSFEYKWSTEGSDFILVRYLEESNKKILQKIRIKGILSNTQSFNKMSIDFKDIKKLSLGYIMSNFKSFNSENELDRDHLGFKIIDNKTYYYDEDSKLVKGLININNSLFYFDPIEFNLVTGWQTINGKKYYFDINTGAALTSYKIINGKHFYFNNDGVMQLGVFKGPDGFEYFAPANTQNNNIEGQAIVYQSKFLTLNGKKYYFDNDSKAVTGWRIINNEKYYFNPNNAIAAVGLQVIDNNKYYFNPDTAIISKGWQTVNGSRYYFDTDTAIAFNGYKTIDGKHFYFDSDCVVKIGVFSTSNGFEYFAPANTYNNNIEGQAIVYQSKFLTLNGKKYYFDDNSKAVTGWQTIDSKKYYFNTNTAEAATGWQTIDGKKYYFNTNTAEAATGWQTIDGKKYYFNTNTAIASTGYTIINGKHFYFNTDGIMQIGVFKGPNGFEYFAPANTDANNIEGQAILYQNEFLTLNGKKYYFGSDSKAVTGWRIINNKKYYFNPNNAIAAIHLCTINNDKYYFSYDGILQNGYITIERNNFYFDANNESKMVTGVFKGPNGFEYFAPANTHNNNIEGQAIVYQNKFLTLNGKKYYFDNDSKAVTGWQTIDGKKYYFNLNTAEAATGWQTIDGKKYYFNLNTAEAATGWQTIDGKKYYFNTNTFIASTGYTSINGKHFYFNTDGIMQIGVFKGPNGFEYFAPANTHNNNIEGQAILYQNKFLTLNGKKYYFGSDSKAVTGLRTIDGKKYYFNTNTAVAVTGWQTINGKKYYFNTNTSIASTGYTIISGKHFYFNTDGIMQIGVFKGPDGFEYFAPANTDANNIEGQAIRYQNRFLYLHDNIYYFGNNSKAATGWVTIDGNRYYFEPNTAMGANGYKTIDNKNFYFRNGLPQIGVFKGSNGFEYFAPANTDANNIEGQAIRYQNRFLHLLGKIYYFGNNSKAVTGWQTINGKVYYFMPDTAMAAAGGLFEIDGVIYFFGVDGVKAPGIYG

SEQ ID NO: 794 - protein, 2710 aa, Clostridium difficile
MSLISKEELIKLAYSIRPRENEYKTILTNLDEYNKLTTNNNENKYLQLKKLNESIDVFMNKYKTSSRNRALSNLKKDILKEVILIKNSNTSPVEKNLHFVWIGGEVSDIALEYIKQWADINAEYNIKLWYDSEAFLVNTLKKAIVESSTTEALQLLEEEIQNPQFDNMKFYKKRMEFIYDRQKRFINYYKSQINKPTVPTIDDIIKSHLVSEYNRDETVLESYRTNSLRKINSNHGIDIRANSLFTEQELLNIYSQELLNRGNLAAASDIVRLLALKNFGGVYLDVDMLPGIHSDLFKTISRPSSIGLDRWEMIKLEAIMKYKKYINNYTSENFDKLDQQLKDNFKLIIESKSEKSEIFSKLENLNVSDLEIKIAFALGSVINQALISKQGSYLTNLVIEQVKNRYQFLNQHLNPAIESDNNFTDTTKIFHDSLFNSATAENSMFLTKIAPYLQVGFMPEARSTISLSGPGAYASAYYDFINLQENTIEKTLKASDLIEFKFPENNLSQLTEQEINSLWSFDQASAKYQFEKYVRDYTGGSLSEDNGVDFNKNTALDKNYLLNNKIPSNNVEEAGSKNYVHYIIQLQGDDISYEATCNLFSKNPKNSIIIQRNMNESAKSYFLSDDGESILELNKYRIPERLKNKEKVKVTFIGHGKDEFNTSEFARLSVDSLSNEISSFLDTIKLDISPKNVEVNLLGCNMFSYDFNVEETYPGKLLLSIMDKITSTLPDVNKNSITIGANQYEVRINSEGRKELLAHSGKWINKEEAIMSDLSSKEYIFFDSIDNKLKAKSKNIPGLASISEDIKTLLLDASVSPDTKFILNNLKLNIESSIGDYIYYEKLEPVKNIIHNSIDDLIDEFNLLENVSDELYELKKLNNLDEKYLISFEDISKNNSTYSVRFINKSNGESVYVETEKEIFSKYSEHITKEISTIKNSIITDVNGNLLDNIQLDHTSQVNTLNAAFFIQSLIDYSSNKDVLNDLSTSVKVQLYAQLFSTGLNTIYDSIQLVNLISNAVNDTINVLPTITEGIPIVSTILDGINLGAAIKELLDEHDPLLKKELEAKVGVLAINMSLSIAATVASIVGIGAEVTIFLLPIAGISAGIPSLVNNELILHDKATSVVNYFNHLSESKKYGPLKTEDDKILVPIDDLVISEIDFNNNSIKLGTCNILAMEGGSGHTVTGNIDHFFSSPSISSHIPSLSIYSAIGIETENLDFSKKIMMLPNAPSRVFWWETGAVPGLRSLENDGTRLLDSIRDLYPGKFYWRFYAFFDYAITTLKPVYEDTNIKIKLDKDTRNFIMPTITTNEIRNKLSYSFDGAGGTYSLLLSSYPISTNINLSKDDLWIFNIDNEVREISIENGTIKKGKLIKDVLSKIDINKNKLIIGNQTIDFSGDIDNKDRYIFLTCELDDKISLIIEINLVAKSYSLLLSGDKNYLISNLSNTIEKINTLGLDSKNIAYNYTDESNNKYFGAISKTSQKSIIHYKKDSKNILEFYNDSTLEFNSKDFIAEDINVFMKDDINTITGKYYVDNNTDKSIDFSISLVSKNQVKVNGLYLNESVYSSYLDFVKNSDGHHNTSNFMNLFLDNISFWKLFGFENINFVIDKYFTLVGKTNLGYVEFICDNNKNIDIYFGEWKTSSSKSTIFSGNGRNVVVEPIYNPDTGEDISTSLDFSYEPLYGIDRYINKVLIAPDLYTSLININTNYYSNEYYPEIIVLNPNTFHKKVNINLDSSSFEYKWSTEGSDFILVRYLEESNKKILQKIRIKGILSNTQSFNKMSIDFKDIKKLSLGYIMSNFKSFNSENELDRDHLGFKIIDNKTYYYDEDSKLVKGLININNSLFYFDPIEFNLVTGWQTINGKKYYFDINTGAALTSYKIINGKHFYFNNDGVMQLGVFKGPDGFEYFAPANTQNNNIEGQAIVYQSKFLTLNGKKYYFDNDSKAVTGWRIINNEKYYFNPNNAIAAVGLQVIDNNKYYFNPDTAIISKGWQTVNGSRYYFDTDTAIAFNGYKTIDGKHFYFDSDCVVKIGVFSTSNGFEYFAPANTYNNNIEGQAIVYQSKFLTLNGKKYYFDNNSKAVTGWQTIDSKKYYFNTNTAEAATGWQTIDGKKYYFNTNTAEAATGWQTIDGKKYYFNTNTAIASTGYTIINGKHFYFNTDGIMQIGVFKGPNGFEYFAPANTDANNIEGQAILYQNEFLTLNGKKYYFGSDSKAVTGWRIINNKKYYFNPNNAIAAIHLCTINNDKYYFSYDGILQNGYITIERNNFYFDANNESKMVTGVFKGPNGFEYFAPANTHNNNIEGQAIVYQNKFLTLNGKKYYFDNDSKAVTGWQTIDGKKYYFNLNTAEAATGWQTIDGKKYYFNLNTAEAATGWQTIDGKKYYFNTNTFIASTGYTIINGKHFYFNTDGIMQIGVFKGPNGFEYFAPANTHNNNIEGQAILYQNKFLTLNGKKYYFGSDSKAVTGLRTIDGKKYYFNTNTAVAVTGWQTINGKKYYFNTNTSIASTGYTIISGKHFYFNTDGIMQIGVFKGPDGFEYFAPANTDANNIEGQAIRYQNRFLYLHDNIYYFGNNSKAATGWVTIDGNRYYFEPNTAMGANGYKTIDNKNFYFRNGLPQIGVFKGSNGFEYFAPANTDANNIEGQAIRYQNRFLHLLGKIYYFGNNSKAVTGWQTINGKVYYFMPDTAMAAAGGLFEIDGVIYFFGVDGVKAPGIYG

SEQ ID NO: 795 - protein, 2710 aa, Clostridium difficile
MSLISKEELIKLAYSIRPRENEYKTILTNLDEYNKLTTNNNENKYLQLKKLNESIDVFMNKYKTSSRNRALSNLKKDILKEVILIKNSNTSPVEKNLHFVWIGGEVSDIALEYIKQWADINAEYNIKLWYDSEAFLVNTLKKAIVESSTTEALQLLEEEIQNPQFDNMKFYKKRMEFIYDRQKRFINYYKSQINKPTVPTIDDIIKSHLVSEYNRDETVLESYRTNSLRKINSNHGIDIRANSLFTEQELLNIYSQELLNRGNLAAASDIVRLLALKNFGGVYLDVDMLPGIHSDLFKTISRPSSIGLDRWEMIKLEAIMKYKKYINNYTSENFDKLDQQLKDNFKLIIESKSEKSEIFSKLENLNVSDLEIKIAFALGSVINQALISKQGSYLTNLVIEQVKNRYQFLNQHLNPAIESDNNFTDTTKIFHDSLFNSATAENSMFLTKIAPYLQVGFMPEARSTISLSGPGAYASAYYDFINLQENTIEKTLKASDLIEFKFPKNNLSQLTEQEINSLWSFDQASAKYQFEKYVRDYTGGSLSEDNGVDFNKNTALDKNYLLNNKIPSNNVEEAGSKNYVHYIIQLQGDDISYEATCNLFSKNPKNSIIIQRNMNESAKSYFLSDDGESILELNKYRIPERLKNKEKVKVTFIGHGKDEFNTSEFARLSVDSLSNEISSFLDTIKLDISPKNVEVNLLGCNMFSYDFNVEETYPGKLLLSIMDKITSTLPDVNKNSITIGANQYEVRINSEGRKELLAHSGKWINKEEAIMSDLSSKEYIFFDSIDNKLKAKSKNIPGLASISEDIKTLLLDASVSPDTKFILNNLKLNIESSIGDYIYYEKLEPVKNIIHNSIDDLIDEFNLLENVSDELYELKKLNNLDEKYLISFEDISKNNSTYSVRFINKSNGESVYVETEKEIFSKYSEHITKEISTIKNSIITDVNGNLLDNIQLDHTSQVNTLNAAFFIQSLIDYSSNKDVLNDLSTSVKVQLYAQLFSTGLNTIYDSIQLVNLISNAVNDTINVLPTITEGIPIVSTILDGINLGAAIKELLDEHDPLLKKELEAKVGVLAINMSLSIAATVASIVGIGAEVTIFLLPIAGISAGIPSLVNNELILHDKATSVVNYFNHLSESKKYGPLKTEDDKILVPIDDLVISEIDFNNNSIKLGTCNILAMEGGSGHTVTGNIDHFFSSPSISSHIPSLSIYSAIGIETENLDFSKKIMMLPNAPSRVFWWETGAVPGLRSLENDGTRLLDSIRDLYPGKFYWRFYAFFDYAITTLKPVYEDTNIKIKLDKDTRNFIMPTITTNEIRNKLSYSFDGAGGTYSLLLSSYPISTNINLSKDDLWIFNIDNEVREISIENGTIKKGKLIKDVLSKIDINKNKLIIGNQTIDFSGDIDNKDRYIFLTCELDDKISLIIEINLVAKSYSLLLSGDKNYLISNLSNTIEKINTLGLDSKNIAYNYTDESNNKYFGAISKTSQKSIIHYKKDSKNILEFYNDSTLEFNSKDFIAEDINVFMKDDINTITGKYYVDNNTDKSIDFSISLVSKNQVKVNGLYLNESVYSSYLDFVKNSDGHHNTSNFMNLFLDNISFWKLFGFENINFVIDKYFTLVGKTNLGYVEFICDNNKNIDIYFGEWKTSSSKSTIFSGNGRNVVVEPIYNPDTGEDISTSLDFSYEPLYGIDRYINKVLIAPDLYTSLININTNYYSNEYYPEIIVLNPNTFHKKVNINLDSSSFEYKWSTEGSDFILVRYLEESNKKILQKIRIKGILSNTQSFNKMSIDFKDIKKLSLGYIMSNFKSFNSENELDRDHLGFKIIDNKTYYYDEDSKLVKGLININNSLFYFDPIEFNLVTGWQTINGKKYYFDINTGAALTSYKIINGKHFYFNNDGVMQLGVFKGPDGFEYFAPANTQNNNIEGQAIVYQSKFLTLNGKKYYFDNDSKAVTGWRIINNEKYYFNPNNAIAAVGLQVIDNNKYYFNPDTAIISKGWQTVNGSRYYFDTDTAIAFNGYKTIDGKHFYFDSDCVVKIGVFSTSNGFEYFAPANTYNNNIEGQAIVYQSKFLTLNGKKYYFDNNSKAVTGWQTIDSKKYYFNTNTAEAATGWQTIDGKKYYFNTNTAEAATGWQTIDGKKYYFNTNTAIASTGYTIINGKHFYFNTDGIMQIGVFKGPNGFEYFAPANTDANNIEGQAILYQNEFLTLNGKKYYFGSDSKAVTGWRIINNKKYYFNPNNAIAAIHLCTINNDKYYFSYDGILQNGYITIERNNFYFDANNESKMVTGVFKGPNGFEYFAPANTHNNNIEGQAIVYQNKFLTLNGKKYYFDNDSKAVTGWQTIDGKKYYFNLNTAEAATGWQTIDGKKYYFNLNTAEAATGWQTIDGKKYYFNTNTFIASTGYTSINGKHFYFNTDGIMQIGVFKGPNGFEYFAPANTHNNNIEGQAILYQNKFLTLNGKKYYFGSDSKAVTGLRTIDGKKYYFNTNTAVAVTGWQTINGKKYYFNTNTSIASTGYTIISGKHFYFNTDGIMQIGVFKGPDGFEYFAPANTDANNIEGQAIRYQNRFLYLHDNIYYFGNNSKAATGWVTIDGNRYYFEPNTAMGANGYKTIDNKNFYFRNGLPQIGVFKGSNGFEYFAPANTDANNIEGQAIRYQNRFLHLLGKIYYFGNNSKAVTGWQTINGKVYYFMPDTAMAAAGGLFEIDGVIYFFGVDGVKAPGIYG

SEQ ID NO: 796 - protein, 2710 aa, Clostridium difficile
MSLISKEELIKLAYSIRPRENEYKTILTNLDEYNKLTTNNNENKYLQLKKLNESIDVFMNKYKNSSRNRALSNLKKDILKEVILIKNSNTSPVEKNLHFVWIGGEVSDIALEYIKQWADINAEYNIKLWYDSEAFLVNTLKKAIVESSTTEALQLLEEEIQNPQFDNMKFYKKRMEFIYDRQKRFINYYKSQINKPTVPTIDDIIKSHLVSEYNRDETLLESYRTNSLRKINSNHGIDIRANSLFTEQELLNIYSQELLNRGNLAAASDIVRLLALKNFGGVYLDVDMLPGIHSDLFKTISRPSSIGLDRWEMIKLEAIMKYKKYINNYTSENFDKLDQQLKDNFKLIIESKSEKSEIFSKLENLNVSDLEIKIAFALGSVINQALISKQGSYLTNLVIEQVKNRYQFLNQHLNPAIESDNNFTDTTKIFHDSLFNSATAENSMFLTKIAPYLQVGFMPEARSTISLSGPGAYASAYYDFINLQENTIEKTLKASDLIEFKFPENNLSQLTEQEINSLWSFDQASAKYQFEKYVRDYTGGSLSEDNEVDFNKNTALDKNYLLNNKIPSNNVEEAGSKNYVHYIIQLQGDDISYEATCNLFSKNPKNSIIIQRNMNESAKSYFLSDDGESILELNKYRIPERLKNKEKVKVTFIGHGKDEFNTSEFARLSVDSLSNEISSFLDTIKLDISPKNVEVNLLGCNMFSYDFNVEETYPGKLLLSIMDKITSTLPDVNKDSITIGANQYEVRINSEGRKELLAHSGKWINKEEAIMSDLSSKEYIFFDSIDNKLKAKSKNIPGLASISEDIKTLLLDASVSPDTKFILNNLKLNIESSIGDYIYYEKLEPVKNIIHNSIDDLIDEFNLLENVSDELYELKKLNNLDEKYLISFEDISKNNSTYSVRFINKSNGESVYVETEKEIFSKYSEHITKEISTIKNSIITDVNGNLLDNIQLDHTSQVNTLNAAFFIQSLIDYSSNKDVLNDLSTSVKVQLYAQLFSTGLNTIYDSIQLVNLISNAVNDTINVLPTITEGIPIVSTILDGINLGAAIKELLDEHDPLLKKELEAKVGVLAINMSLSIAATVASIVGIGAEVTIFLLPIAGISAGIPSLVNNELILHDKATSVVNYFNHLSESKEYGPLKTEDDKILVPIDDLVISEIDFNNNAIKLGTCNILAMEGGSGHTVTGNIDHFFSSPSISSHIPSLSIYSAIGIKTENLDFSKKIMMLPNAPSRVFWWETGAVPGLRSLENNGTKLLDSIRDLYPGKFYWRFYAFFDYAITTLKPVYEDTNIKIKLDKDTRNFIMPTITTNEIRNKLSYSFDGAGGTYSLLLSSYPISTNINLSKDDLWIFNIDNEVREISIENGTIKKGKLIKDVLSKIDINKNKLIIGNQTIDFSGDIDNKDRYIFLTCELDDKISLIIEINLVAKSYSLLLSGDKNYLISNLSNTIEKINTLGLDSKNIAYNYTDESNNKYFGAISKTSQKSIIHYKKDSKNILEFYNGSTLEFNSKDFIAEDINVFMKDDINTITGKYYVDNNTDKSIDFSISLVSKNQVKVNGLYLNESVYSSYLDFVKNSDGHHNTSNFMNLFLDNISFWKLFGFENINFVVDKYFTLVGKTNLGYVEFICDNNKNIDIYFGEWKTSSSKSTIFSGNGRNVVVEPIYNPDTGEDISTSLDFSYEPLYGIDRYINKVLIAPDLYTSLININTNYYSNEYYPEIIVLNPNTFHKKVNINLDSSSFEYKWSTEGSDFILVRYLEESNKKILQKIRIKGILSNTQSFNKMSIDFKDIKKLSLVYIMSNFKSFNSENELDRDHLGFKIIDNKTYYYDEASKLVKGLININNSLFYFDPIESNLVTGWQTINGKKYYFDINTGAASTSYKIINGKHFYFNNNGVMQLGVFKGPDGFEYFAPANTQNNNIEGQAIVYQSKFLTLNGKKYYFDNNSKAVTGWRIINNEKYYFNPNNAIAAVGLQVIDNNKYYFNPDTAIISKGWQTVNGSRYYFDTDTAIAFNGYKTIDGKHFYFDSDCVVKIGVFSGSNGFEYFAPANTYNNNIEGQAIVYQSKFLTLNGKKYYFDNNSKAVTGWQTIDSKKYYFNTNTAEAATGWQTIDGKKYYFNTNTAEAATGWQTIDGKKYYFNTNTSIASTGYTIINGKHFYFNTDGIMQIGVFKGPNGFEYFAPANTHNNNIEGQAILYQNKFLTLNGKKYYFGSDSKAITGWQTIDGKKYYFNPNNAIAATHLCTINNDKYYFSYDGILQNGYITIERNNFYFDANNESKMVTGVFKGPNGFEYFAPANTHNNNIEGQAIVYQNKFLTLNGKKYYFDNDSKAVTGWQTIDGKKYYFNLNTAVAVTGWQTIDGKKYYFNLNTAEAATGWQTIDGKKYYFNTNTFIASTGYTIINGKHFYFNTDGIMQIGVFKGTNGFEYFAPANTHNNNIEGQAILYQNKFLTLNGKKYYFGSDSKAVTGLRTIDGKKYYFNTNTAVAVTGWQTINGKKYYFNTNTSIASTGYTIISGKHFYFNTDGIMQIGVFKGSDGFEYFAPANTDANNIEGQAIRYQNRFLYLHDNIYYFGNNSKAVTGWATIDGNRYYFEPDTAMGANGYKTIDNKNFYFRNGLPQIGVFKGPNGFEYFAPANTDANNIDGQAIRYQNRFLHLLGNIYYFGNNSKAVTGWQTINGKVYYFMPDTAMAAAGGLFEIDGVIYFFGVDGVKAPGIYG

SEQ ID NO: 797 - protein, 2710 aa, Clostridium difficile
MSLISKEELIKLAYSIRPRENEYKTILTNLDEYNKLTTNNNENKYLQLKKLNESIDVFMNKYKNSSRNRALSNLKKDILKEVILIKNSNTSPVEKNLHFVWIGGEVSDIALEYIKQWADINAEYNIKLWYDSEAFLVNTLKKAIVESSTTEALQLLEEEIQNPQFDNMKFYKKRMEFIYDRQKRFINYYKSQINKPTVPTIDDIIKSHLVSEYNRDETLLESYRTNSLRKINSNHGIDIRANGLFTEQELLNIYSQELLNRGNLAAASDIVRLLALKNFGGVYLDVDMLPGIHSDLFKTISRPSSIGLDRWEMIKLEAIMKYKKYINNYTSENFDKLDQQLKDNFKLIIESKSEKSEIFSKLENLNVSDLEIKIAFALGSVINQALISKQGSYLTNLVIEQVKNRYQFLNQHLNPAIESDNNFTDTTKIFHDSLFNSATAENSMFLTKIAPYLQVGFMPEARSTISLSGPGAYASAYYDFINLQENTIEKTLKASDLIEFKFPENNLSQLTEQEINSLWSFDQASAKYQFEKYVRDYTGGSLSEDNEVDFNKNTALDKNYLLNNKIPSNNIEEAGSKNYVHYIIQLQGDDISYEATCNLFSKNPKNSIIIQRNMNESAKSYFLSDDGESILELNKYRIPERLKNKEKVKVTFIGHGKDEFNTSEFARLSVDSLSNEISSFLDTIKLDISPKNVEVNLLGCNMFSYDFNVEETYPGKLLLSIMDKITSTLPDVNKDSITIGANQYEVRINSEGRKELLAHSGKWINKEEAIMSDLSSKEYIFFDSIDNKLKAKSKNIPGLASISEDIKTLLLDASVSPDTKFILNNLKLNIESSIGDYIYYEKLEPVKNIIHNSIDDLIDEFNLLENVSDELYELKKLNNLDEKYLISFEDISKNNSTYSVRFINKSNGESVYVETEKEIFSKYSEHITKEISTIKNSIITDVNGNLLDNIQLDHTSQVNTLNAAFFIQSLIDYSSNKDVLNDLSTSVKVQLYAQLFSTGLNTIYDSIQLVNLISNAVNDTINVLPTITEGIPIVSTILDGINLGAAIKELLDEHDPLLKKELEAKVGVLAINMSLSIAATVASIVGIGAEVTIFLLPIAGISAGIPSLVNNELILHDKATSVVNYFNHLSESKEYGPLKTEDDKILVPIDDLVISEIDFNNNAIKLGTCNILAMEGGSGHTVTGNIDHFFSSPSISSHIPSLSIYSAIGIKTENLDFSKKIMMLPNAPSRVFWWETGAVPGLRSLENNGTKLLDSIRDLYPGKFYWRFYAFFDYAITTLKPVYEDTNIKIKLDKDTRNFIMPTITTNEIRNKLSYSFDGAGGTYSLLLSSYPISTNINLSKDDLWIFNIDNEVREISIENGTIKKGKLIKDVLSKIDINKNKLIIGNQTIDFSGDIDNKDRYIFLTCELDDKISLIIEINLVAKSYSLLLSGDKNYLISNLSNTIEKINTLGLDSKNIAYNYTDESNNKYFGAISKTSQKSIIHYKKDSKNILEFYNGSTLEFNSKDFIAEDINVFMKDDINTITGKYYVDNNTDKSIDFSISLVSKNQVKVNGLYLNESVYSSYLDFVKNSDGHHNTSNFMNLFLDNISFWKLFGFENINFVVDKYFTLVGKTNLGYVEFICDNNKNIDIYFGEWKTSSSKSTIFSGNGRNVVVEPIYNPDTGEDISTSLDFSYEPLYGIDRYINKVLIALDLYTSLININTNYYSNEYYPEIIVLNPNTFHKKVNINLDSSSFEYKWSTEGSDFILVRYLEESNKKILQKIRIKGILSNTQSFNKMSIDFKDIKKLSLVYIMSNFKSFNSENELDRDHLGFKIIDNKTYYYDEASKLVKGLININNSLFYFDPIESNLVTGWQTINGKKYYFDINTGAASTSYKIINGKHFYFNNNGVMQLGVFKGPDGFEYFAPANTQNNNIEGQAIVYQSKFLTLNGKKYYFDNNSKAVTGWRIINNEKYYFNPNNAIAAVGLQVIDNNKYYFNPDTAIISKGWQTVNGSRYYFDTDTAIAFNGYKTIDGKHFYFDSDCVVKIGVFSGSNGFEYFAPANTYNNNIEGQAIVYQSKFLTLNGKKYYFDNNSKAVTGWQTIDSKKYYFNTNTAEAATGWQTIDGKKYYFNTNTAEAATGWQTIDGKKYYFNTNTSIASTGYTIINGKHFYFNTDGIMQIGVFKGPNGFEYFAPANTHNNNIEGQAILYQNKFLTLNGKKYYFGSDSKAITGWQTIDGKKYYFNPNNAIAATHLCTINNDKYYFSYDGILQNGYITIERNNFYFDANNESKMVTGVFKGPNGFEYFAPANTHNNNIEGQAIVYQNKFLTLNGKKYYFDNDSKAVTGWQTIDGKKYYFNLNTAVAVTGWQTIDGKKYYFNLNTAEAATGWQTIDGKKYYFNTNTFIASTGYTIINGKHFYFNTDGIMQIGVFKGPNGFEYFAPANTHNNNIEGQAILYQNKFLTLNGKKYYFGSDSKAVTGLRTIDGKKYYFNTNTAVAVTGWQTINGKKYYFNTNTSIASTGYTIISGKHFYFNTDGIMQIGVFKGSDGFEYFAPANTDANNIEGQAIRYQNRFLYLHDNIYYFGNNSKAVTGWATIDGNRYYFEPDTAMGANGYKTIDNKNFYFRNGLPQIGVFKGPNGFEYFAPANTDANNIDGQAIRYQNRFLHLLGNIYYFGNNSKAVTGWQTINGKVYYFMPDTAMAAAGGLFEIDGVIYFFGVDGVKAPGIYG

SEQ ID NO: 798 - protein, 2710 aa, Clostridium difficile
MSLISKEELIKLAYSIRPRENEYKTILTNLDEYNKLTTNNNENKYLQLKKLNESIDVFMNKYKNSSRNRALSNLKKDILKEVILIKNSNTSPVEKNLHFVWIGGEVSDIALEYIKQWADINAEYNIKLWYDSEAFLVNTLKKAIVESSTTEALQLLEEEIQNPQFDNMKFYKKRMEFIYDRQKRFINYYKSQINKPTVPTIDDIIKSHLVSEYNRDETLLESYRTNSLRKINSNHGIDIRANSLFTEQELLNIYSQELLNRGNLAAASDIVRLLALKNFGGVYLDVDMLPGIHSDLFKTIPRPSSIGLDRWEMIKLEAIMKYKKYINNYTSENFDKLDQQLKDNFKLIIESKSEKSEIFSKLENLNVSDLEIKIAFALGSVINQALISKQGSYLTNLVIEQVKNRYQFLNQHLNPAIESDNNFTDTTKIFHDSLFNSATAENSMFLTKIAPYLQVGFMPEARSTISLSGPGAYASAYYDFINLQENTIEKTLKASDLIEFKFPENNLSQLTEQEINSLWSFDQASAKYQFEKYVRDYTGGSLSEDNGVDFNKNTALDKNYLLNNKIPSNNVEEAGSKNYVHYIIQLQGDDISYEATCNLFSKNPKNSIIIQRNMNESAKSYFLSDDGESILELNKYRIPERLKNKEKVKVTFIGHGKDEFNTSEFARLSVDSLSNEISSFLDTIKLDISPKNVEVNLLGCNMFSYDFNVEETYPGKLLLSIMDKITSTLPDVNKDSITIGANQYEVRINSEGRKELLAHSGKWINKEEAIMSDLSSKEYIFFDSIDNKLKAKSKNIPGLASISEDIKTLLLDASVSPDTKFILNNLKLNIESSIGDYIYYEKLEPVKNIIHNSIDDLIDEFNLLENVSDELYELKKLNNLDEKYLISFEDISKNNSTYSVRFINKSNGESVYVETEKEIFSKYSEHITKEISTIKNSIITDVNGNLLDNIQLDHTSQVNTLNAAFFIQSLIDYSSNKDVLNDLSTSVKVQLYAQLFSTGLNTIYDSIQLVNLISNAVNDTINVLPTITEGIPIVSTILDGINLGAAIKELLDEHDPLLKKELEAKVGVLAINMSLSIAATVASIVGIGAEVTIFLLPIAGISAGIPSLVNNELILHDKATSVVNYFNHLSESKKYGPLKTEDDKILVPIDDLVISEIDFNNNSIKLGTCNILAMEGGSGHTVTGNIDHFFSSPYISSHIPSLSVYSAIGIKTENLDFSKKIMMLPNAPSRVFWWETGAVPGLRSLENDGTKLLDSIRDLYPGKFYWRFYAFFDYAITTLKPVYEDTNTKIKLDKDTRNFIMPTITTDEIRNKLSYSFDGAGGTYSLLLSSYPISMNINLSKDDLWIFNIDNEVREISIENGTIKKGNLIEDVLSKIDINKNKLIIGNQTIDFSGDIDNKDRYIFLTCELDDKISLIIEINLVAKSYSLLLSGDKNYLISNLSNTIEKINTLGLDSKNIAYNYTDESNNKYFGAISKTSQKSIIHYKKDSKNILEFYNGSTLEFNSKDFIAEDINVFMKDDINTITGKYYVDNNTDKSIDFSISLVSKNQVKVNGLYLNESVYSSYLDFVKNSDGHHNTSNFMNLFLNNISFWKLFGFENINFVIDKYFTLVGKTNLGYVEFICDNNKNIDIYFGEWKTLSSKSTIFSGNGRNVVVEPIYNPDTGEDISTSLDFSYEPLYGIDRYINKVLIAPDLYTSLININTNYYSNEYYPEIIVLNPNTFHKKVNINLDSSSFEYKWSTEGSDFILVRYLEESNKKILQKIRIKGILSNTQSFNKMSIDFKDIKKLSLGYIMSNFKSFNSENELDRDHLGFKIIDNKTYYYDEDSKLVKGLININNSLFYFDPIESNLVTGWQTINGKKYYFDINTGAASTSYKIINGKHFYFNNNGVMQLGVFKGPDGFEYFAPANTQNNNIEGQAIVYQSKFLTLNGKKYYFDNDSKAVTGWRIINNEKYYFNPNNAIAAVGLQVIDNNKYYFNPDTAIISKGWQTVNGSRYYFDTDTAIAFNGYKTIDGKHFYFDSDCVVKIGVFSGSNGFEYFAPANTYNNNIEGQAIVYQSKFLTLNGKKYYFDNNSKAVTGWQTIDSKKYYFNTNTAEAATGWQTIDGKKYYFNTNTAEAATGWQTIDGKKYYFNTNTSIASTGYTIINGKHFYFNTDGIMQIGVFKGPNGFEYFAPANIHNNNIEGQAILYQNKFLTLNGKKYYFGSDSKAITGWQTIDGKKYYFNPNNAIAATHLCTINNDKYYFSYDGILQNGYITIERNNFYFDANNESKMVTGVFKGPNGFEYFAPANTHNNNIEGQAIVYQNKFLTLNGKKYYFDNDSKAVTGWQTIDSKKYYFNLNTAVAVTGWQTIDGEKYYFNLNTAEAATGWQTIDGKRYYFNTNTYIASTGYTIINGKHFYFNTDGIMQIGVFKGPDGFEYFAPANTHNNNIEGQAILYQNKFLTLNGKKYYFGSDSKAVTGLRTIDGKKYYFNTNTAVAVTGWQTINGKKYYFNTNTYIASTGYTIISGKHFYFNTDGIMQIGVFKGPDGFEYFAPANTDANNIEGQAIRYQNRFLYLHDNIYYFGNDSKAATGWATIDGNRYYFEPNTAMGANGYKTIDNKNFYFRNGLPQIGVFKGPNGFEYFAPANTDANNIDGQAIRYQNRFLHLLGKIYYFGNNSKAVTGWQTINGKVYYFMPDTAMAAAGGLFEIDGVIYFFGVDGVKAPGIYG

SEQ ID NO: 799 - protein, 2710 aa, Clostridium difficile
MSLISKEELIKLAYSIRPRENEYKTILTNLDEYNKLTTNNNENKYLQLKKLNESIDVFMNKYKNSSRNRALSNLKKDILKEVILIKNSNTSPVEKNLHFVWIGGEVSDIALEYIKQWADINAEYNIKLWYDSEAFLVNTLKKAIVESSTTEALQLLEEEIQNPQFDNMKFYKKRMEFIYDRQKRFINYYKSQINKPTVPTIDDIIKSHLVSEYNRDETLLESYRTNSLRKINSNHGIDIRANSLFTEQELLNIYSQELLNRGNLAAASDIVRLLALKNFGGVYLDVDMLPGIHSDLFKTIPRPSSIGLDRWEMIKLEAIMKYKKYINNYTSENFDKLDQQLKDNFKLIIESKSEKSEIFSKLENLNVSDLEIKIAFALGSVINQALISKQGSYLTNLVIEQVKNRYQFLNQHLNPAIESDNNFTDTTKIFHDSLFNSATAENSMFLTKIAPYLQVGFMPEARSTISLSGPGAYASAYYDFINLQENTIEKTLKASDLIEFKFPENNLSQLTEQEINSLWSFDQASAKYQFEKYVRDYTGGSLSEDNGVDFNKNTAFDKNYLLNNKIPSNNVEEAGSKNYVHYIIQLQGDDISYEATCNLFSKNPKNSIIIQRNMNESAKSYFLSDDGESILELNKYRIPERLKNKEKVKVTFIGHGKDEFNTSEFARLSVDSLSNEISSFLDTIKLDISPKNVEVNLLGCNMFSYDFNVEETYPGKLLLSIMDKITSTLPDVNKDSITIGANQYEVRINSEGRKELLAHSGKWINKEEAIMSDLSSKEYIFFDSIDNKLKAKSKNIPGLASISEDIKTLLLDASVSPDTKFILNNLKLNIESSIGDYIYYEKLEPVKNIIHNSIDDLIDEFNLLENVSDELYELKKLNNLDEKYLISFEDISKNNSTYSVRFINKSNGESVYVETEKEIFSKYSEHITKEISTIKNSIITDVNGNLLDNIQLDHTSQVNTLNAAFFIQSLIDYSSNKDVLNDLSTSVKVQLYAQLFSTGLNTIYDSIQLVNLISNAVNDTINVLPTITEGIPIVSTILDGINLGAAIKELLDEHDPLLKKELEAKVGVLAINMSLSIAATVASIVGIGAEVTIFLLPIAGISAGIPSLVNNELILHDKATSVVNYFNHLSESKEYGPLKTEDDKILVPIDDLVISEIDFNNNSIKLGTCNILAMEGGSGHTVTGNIDHFFSSPYISSHIPSLSVYSAIGIKTENLDFSKKIMMLPNAPSRVFWWETGAVPGLRSLENNGTKLLDSIRDLYPGKFYWRFYAFFDYAITTLKPVYEDTNTKIKLDKDTRNFIMPTITTDEIRNKLSYSFDGAGGTYSLLLSSYPISMNINLSKDDLWIFNIDNEVREISIENGTIKKGNLIEDVLSKIDINKNKLIIGNQTIDFSGDIDNKDRYIFLTCELDDKISLIIEINLVAKSYSLLLSGDKNYLISNLSNTIEKINTLGLDSKNIAYNYTDESNNKYFGAISKTSQKSIIHYKKDSKNILEFYNGSTLEFNSKDFIAEDINVFMKDDINTITGKYYVDNNTDKSIDFSISLVSKNQVKVNGLYLNESVYSSYLDFVKNSDGHHNTSNFMNLFLNNISFWKLFGFENINFVIDKYFTLVGKTNLGYVEFICDNNKNIDIYFGEWKTSSSKSTIFSGNGRNVVVEPIYNPDTGEDISTSLDFSYEPLYGIDRYINKVLIAPDLYTSLININTNYYSNEYYPEIIVLNPNTFHKKVNINLDSSSFEYKWSTEGSDFILVRYLEESNKKILQKIRIKGILSNTQSFNKMSIDFKDIKKLSLGYIMSNFKSFNSENELDRDHLGFKIIDNKTYYYDEDSKLVKGLININNSLFYFDPIESNLVTGWQTINGKKYYFDINTGAASTSYKIINGKHFYFNNNGVMQLGVFKGPDGFEYFAPANTQNNNIEGQAIVYQSKFLTLNGKKYYFDNDSKAVTGWRIINNEKYYFNPNNAIAAVGLQVIDNNKYYFNPDTAIISKGWQTVNGSRYYFDTDTAIAFNGYKTIDGKHFYFDSDCVVKIGVFSGSNGFEYFAPANTYNNNIEGQAIVYQSKFLTLNGKKYYFDNNSKAVTGWQTIDSKKYYFNTNTAEAATGWQTIDGKKYYFNTNTAEAATGWQTIDGKKYYFNTNTSIASTGYTIINGKYFYFNTDGIMQIGVFKVPNGFEYFAPANTHNNNIEGQAILYQNKFLTLNGKKYYFGSDSKAITGWQTIDGKKYYFNPNNAIAATHLCTINNDKYYFSYDGILQNGYITIERNNFYFDANNESKMVTGVFKGPNGFEYFAPANTHNNNIEGQAIVYQNKFLTLNGKKYYFDNDSKAVTGWQTIDSKKYYFNLNTAVAVTGWQTIDGEKYYFNLNTAEAATGWQTIDGKRYYFNTNTYIASTGYTIINGKHFYFNTDGIMQIGVFKGPDGFEYFAPANTHNNNIEGQAILYQNKFLTLNGKKYYFGSDSKAVTGLRTIDGKKYYFNTNTAVAVTGWQTINGKKYYFNTNTYIASTGYTIISGKHFYFNTDGIMQIGVFKGPDGFEYFAPANTDANNIEGQAIRYQNRFLYLHDNIYYFGNDSKAATGWATIDGNRYYFEPNTAMGANGYKTIDNKNFYFRNGLPQIGVFKGPNGFEYFAPANTDANNIDGQAIRYQNRFLHLLGKIYYFGNNSKAVTGWQTINSKVYYFMPDTAMAAAGGLFEIDGVIYFFGVDGVKAPGIYG

SEQ ID NO: 800 - protein, 2710 aa, Clostridium difficile
MSLISKEELIKLAYSIRPRENEYKTILTNLDEYNKLTTNNNENKYLQLKKLNESIDVFMNKYKNSSRNRALSNLKKDILKEVILIKNSNTSPVEKNLHFVWIGGEVSDIALEYIKQWADINAEYNIKLWYDSEAFLVNTLKKAIVESSTTEALQLLEEEIQNPQFDNMKFYKKRMEFIYDRQKRFVNYYKSQINKPTVPTIDDIIKSHLVSEYNRDETLLESYRTNSLRKINSNHGIDIRANSLFTEQELLNIYSQELLNRGNLAAASDIVRLLALKNFGGVYLDVDMLPGIHSDLFKTISRPSSIGLDRWEMIKLEAIMKYKKYINNYTSENFDKLDQQLKDNFKLIIESKSEKSEIFSKLENLNVSDLEIKIAFALGSVINQALISKQGSYLTNLVIEQVKNRYQFLNQHLNPAIESDNNFTDTTKIFHDSLFNSATAENSMFLTKIAPYLQVGFMPEARSTISLSGPGAYASAYYDFINLQENTIEKTLKASDLIEFKFPENNLSQLTEQEINSLWSFDQASAKYQFEKYVRDYTGGSLSEDNEVDFNKNTALDKNYLLNNKIPSNNVEEAGSKNYVHYIIQLQGDDISYEATCNLFSKNPKNSIIIQRNMNESAKSYFLSDDGESILELNKYRIPERLKNKEKVKVTFIGHGKDEFNTSEFARLSVDSLSNEISSFLDTIKLDISPKNVEVNLLGCNMFSYDFNVEETYPGKLLLSIMDKITSTLPDVNKDSITIGANQYEVRINSEGRKELLAHSGKWINKEEAIMSDLSSKEYIFFDSIDNKLKAKSKNIPGLASISEDIKTLLLDTSVSPDTKFILNNLKLNIESSVGDYIYYEKLEPVKNIIHNSIDDLIDEFNLLENVSDELYELKKLNNLDEKYLISFEDISKNNSTYSVRFINKSNGESVYVETEKEIFSKYSEHITKEISTIKNSIITDVNGNLLDNIQLDHTSQVNTLNAAFFIQSLIDYSSNKDLLNDLSTSVKVQLYAQLFSTGLNTIYDSIQLVNLISNAVNDTINVLPTITEGIPIVSTILDGINLGAAIKELLDEHDPLLKKELEAKVGVLAINMSLSIAATVASIVGIGAEVTIFLLPIAGISAGIPSLVNNELILHDKATSVVNYFNHLSESKEYGPLKTEDDKILVPIDDLVISEIDFNNNAIKLGTCNILAMEGGSGHTVTGNIDHFFSSPSISSHIPSLSIYSAIGIKTENLDFSKKIMMLPNAPSRVFWWETGAVPGLRSLENNGTKLLDSIRDLYPGKFYWRFYAFFDYAITTLKPVYEDTNIKIKLDKDTRNFIMPTITTNEIRNKLSYSFDGAGGTYSLLLSSYPISTNINLSKDDLWIFNIDNEVREISIENGTIKKGKLIKDVLSKIDINKNKLIIGNQTIDFSGDIDNKDRYIFLTCELDDKISLIIEINLVAKSYSLLLSGDKNYLISNLSNTIEKINTLGLDSKNIAYNYTDESNNKYFGAISKTSQKSIIHYKKDSKNILEFYNGSTLEFNSKDFIAEDINVFMKDDINTITGKYYVDNNTDKSIDFSISLVSKNQAKVNGLYLNESVYSSYLDFVKNADGHHNTSNFMNLFLDNISFWKLFGFENINFVVDKYFTLVGKTNLGYVEFICDNNKNIDIYFGEWKTSSSKSTIFSGNGRNVVVEPIYNPDTGEDISTSLDFSYEPLYGIDRYINKVLIAPDLYTSLININTNYYSNEYYPEIIVLNPNTFHKKVNINLDSSSFEYKWSTEGSDFILVRYLEESNKKILQKIRIKGILSNTQSFNKMSIDFKDIKKLSLVYIMSNFKSFNSENELDRDHLGFKIIDNKTYYYDEASKLVKGLININNSLFYFDPIESNLVTGWQTINGKKYYFDINTGAALTSYKIINGKHFYFNNNGVMQLGVFKGPDGFEYFAPANTQNNNIEGQAIVYQSKFLTLNGKKYYFDNDSKAVTGWRIINNEKYYFNPNNAIAAVGLQVIDNNKYYFNPDTAIISKGWQTVNGSRYYFDTDTAIAFNGYKTIDGKHFYFDSDCVVKIGVFSGSNGFEYFAPANTYNNNIEGQAIVYQSKFLTLNGKKYYFDNNSKAVTGWQTIDSKKYYFNTNTAEAATGWQTIDGKKYYFNTNTAEVATGWQTIDGKKYYFNTNTSIASTGYTIINGKHFYFNTDGIMQIGVFKGPDGFEYFAPANTDANNIEGQAILYQNKFLTLNGKKYYFASDSKAVTGWRIINNKKYYFNPNNAIAATHLYTINNDKYYFSYDGILQNGYITIERNNFYFDANNESKMVTGVFKGPNGFEYFAPANTHNNNIEGQAIVYQNKFLTLNGKKYYFDNDSKAVTGWQTIDGKKYYFNLNTAVAVTGWQTIDGKKYYFNTNTAEAATGWQTIDGKKYYFNTNTSIASTGYTIINGKHFYFNTDGIMQIGVFKGPDGFEYFAPANTDANNIEGQAILYQNKFLTLNGKKYYFASDSKAVTGLRTIDGKKYYFNTNTAEAATGWQTIDGKKYYFNTNTSIASTGYTIINDKHFYFNTDGIMQIGVFKGPDGFEYFAPANTDANNIEGQAIRYQNRFLYLHDNIYYFGNNSKAATGWVTIDGRRYYFEPNTAIGANGYKIIDNKNFYFRNGLPQIGVFKGPNGFEYFAPANTDANNIDGQAIRYQNRFLHLLGNIYYFGNNSKAVTGWQTINGNMYYFMPDTAMAAAGGLFEIDGVIYFFGVDGVKAPGIYG

SEQ ID NO: 801 - protein, 2366 aa, Clostridium difficile; identical to SEQ ID NO: 2

SEQ ID NO: 802 - protein, 2366 aa, Clostridium difficile; identical to SEQ ID NO: 21

SEQ ID NO: 803 - protein, 2367 aa, Clostridium difficile; identical to SEQ ID NO: 121

SEQ ID NO: 804 - protein, 2366 aa, Clostridium difficile; identical to SEQ ID NO: 116

SEQ ID NO: 805 - protein, 2366 aa, Clostridium difficile; identical to SEQ ID NO: 120

SEQ ID NO: 806 - protein, 2366 aa, Clostridium difficile
MSLVNRKQLEKMANVRFRTQEDEYVAILDALEEYHNMSENTVVEKYLKLKDINSLTDIYIDTYKKSGRNKALKKFKEYLVTEVLELKNNNLTPVEKNLHFVWIGGQINDTAINYINQWKDVNSDYNVNVFYDSNAFLINTLKKTIVESATNDTLESFRENLNDPRFDYNKFFRKRMEIIYDKQKNFINYYKAQREENPELIIDDIVKTYLSNEYSKEIDELNAYIEESLNKITQNSGNDVRNFEEFKNGESFNLYEQELVERWNLAAASDILRISALKEIGGVYLDVDMLPGIQPDLFESIEKPSSVTVDFWEMTKLEAIMKYKEYIPGYTSEHFDMLDEEVQSSFESALASKSDKSEIFSSLGDMEASPLEVKIAFNSKGIINQGLISVKDSYCSNLIVKQIENRYKILNNSLNPAISEDNDFNTTTNAFIDSIMAEANADNGRFMMELGKYLRVGFFPDVKTTINLSGPEAYAAAYQDLLMFKEDSMNIHLIEADLRNFEIPKTNISQSTEQEMASLWSFDDARAKAQFEEYKRNYFEGSLGEDDNLDFSQNIVVDKEYLLEKISSLARSSERGYIHYIVQLQGDKISYEAACNLFAKTPYDSILFQKNIEDSEIAYYYNPGDGEIQEIDKYKIPSIISDRPKIKLTFIGHGKDEFNTDIFAGLDVDSLSTEIETAIDLAKEDISPKSIEINLLGCNMFSYSINVEETYPGKLLLKVKDKISELMPSISQDSIIVSANQYEVRINSEGRRELLDHSGEWINKEESIIKDISSKEYISFNPKENKITVKSKNLPELSTLLQEIRNNSNSSDIELEEKVMLTECEINVISNIDTQIVEERIEEAKNLTSDSINYIKNEFKLIESISDALCDLKQQNELDDSHFISFEDISETDEGFSIRFINKETGESIFVETEKTIFSEYANHITEEISKIKDTIFDTVNGKLVKKVNLDTTHEVNTLNAAFFIQSLIEYNSSKESLSNLSVAMKVQVYAQLFSTGLNTITDAAKVVELVSTALDETIDLLPTLSEGLPVIATIIDGVSLGAAIKELSETSDPLLRQEIEAKIGIMAVNLTAATTAIITSSLGIASGFSILLVPLAGISAGIPSLVNNELVLRDKATKVVDYFKHVSLVETEGVFTLLDDKIMMPQDDLVISEIDFNNNSIVLGKCEIWRMEGGSGHTITDDIDHFFSAPSITYREPHLSIYDVLEVQKEELDLSKDLMVLPNAPNRVFAWETGWTPGLRSLENDGTKLLDRIRDHYEGEFYWRYFAFIADALITTLKPRYEDTNIRINLDSNTRSFIVPIITTEYIREKLSYSFYGSGGTYALSLSQYNMGINIELSESDVWIIDVDNVVRDVTIESDKIKKGDLIEGILSTLSIEENKIILNSHEINFSGDVNGSNGFVSLTFSILEGINAIIEVDLLSKSYKLLISGELKILMLNSNHIQQKIDYIGFNSELQKNIPYSFVNDEGKENGFINGSTKEGLFVSELPDVVLISKVYMDDSKPSFGYYSNNLKDVKVITKDDVNILTGYYLKDDIKISLSLTLQDEKTIKLNSVHLDESGVAEILKFMNKKGSTNTSDSLMSFLESMNIKSIFVNFLQSNIKFILDTNFIISGTTSIGQFEFICDENDNIQPYFIKFNTLETNYTLYVGNRQNMIVEPNYDLDDSGDISSTVINFSQKYLYGIDSCVNKVVISPNIYTDEINITPVYETNNTYPEVIVLDANYINEKINVNINDLSIRYVWSNDGNDFILMSTSEENKVSQVKIRFVNVFKDKTLANKLSFNFSDKQDVPVSKIISSFTPSYYDGGLIGYGLGLVSLYNEKFYINNFGMMVSGLIYINDSLYYFKPPVNNLITGFMTVGDDKYYFNPTNGGAASIGETIIDDKNYYFNQSGVLQTGVFSTEDGFKYFAPANTLDENLEGEAIDFTGKLIIDENIYYFEDNYRGAVEWKELDGEMYYFSPETGKAFKGLNQIGDDKYYFNSDGVMQKGFVSINDKKHYFDDSGVMKVGYTEIDGKYFYFAENGEMQIGVFNTEDGFKYFAHHNEDLGNEEGEEISYSGILNFNNKIYYFDDSFTAVVGWKDLEDGSKYYFDEDTAEAYIGLSLINDGQYYFNDDGIMQVGFVAINDKVFYFSDSGIIESGVQNIDDNYFYIDEKGIVQIGVFDTSDGYKYFAPANTVNDNIYGQAVEYSGLVRVGEDVYYFGETYTIETGWIYDMENESDKYYFNPETKKACKGINLIDDIKYYFDENGIMRTGLISFENNDYYFNENGEMQFGYINIEDKMFYFGEDGVMQIGVFNTPDGFKYFAHQNTLDENFEGESINYTGWLDLDEKRYYFTDEYIAATGSVIIDGEEYYFDPDTAQLVISE

SEQ ID NO: 807 - protein, 2366 aa, Clostridium difficile
MSLVNRKQLEKMANVRFRTQEDEYVAILDALEEYHNMSENTVVEKYLKLKDINSLTDIYIDTYKKSGRNKALKKFKEYLVTEVLELKNNNLTPVEKNLHFVWIGGQINDTAINYINQWKDVNSDYNVNVFYDSNAFLINTLKKTVVESAINDTLESFRENLNDPRFDYNKFFRKRMEIIYDKQKNFINYYKAQREENPELIIDDIVKTYLSNEYSKEIDELNTYIEESLNKITQNSGNDVRNFEEFKNGESFNLYEQELVERWNLAAASDILRISALKEIGGMYLDVDMLPGIQPDLFESIEKPSSVTVDFWEMTKLEAIMKYKEYIPEYTSEHFDMLDEEVQSSFESVLASKSDKSEIFSSLGDMEASPLEVKIAFNSKGIINQGLISVKDSYCSNLIVKQIENRYKILNNSLNPAISEDNDFNTTTNTFIDSIMAEANADNGRFMMELGKYLRVGFFPDVKTTINLSGPEAYAAAYQDLLMFKEGSMNIHLIEADLRNFEISKTNISQSTEQEMASLWSFDDSRAKAQFEEYKRNYFEGSLGEDDNLDFSQNIVVDKEYLLEKISSLARSSERGYIHYIVQLQGDKISYEAACNLFAKTPYDSVLFQKNIEDSEIAYYYNPGDGEIQEIDKYKIPSIISDRPKIKLTFIGHGKDEFNTDIFAGFDVDSLSTEIEAAIDLAKEDISPKSIEINLLGCNMFSYSINVEETYPGKLLLKVKDKISELMPSISQDSIIVSANQYEVRINSEGRRELLDHSGEWINKEESIIKDISSKEYISFNPKENKITVKSKNLPELSTLLQEIRNNSNSSDIELEEKVMLTECEINVISNIDTQIVEERIEEAKNLTSDSINYIKDEFKLIESISDALCDLKQQNELEDSHFISFEDISETDEGFSIRFINKETGESIFVETEKTIFSEYANHITEEISKIKGTIFDTVNGKLVKKVNLDTTHEVNTLNAAFFIQSLIEYNSSKESLSNLSVAMKVQVYAQLFSTGLNTITDAAKVVELVSTALDETIDLLPTLSEGLPIIATIIDGVSLGAAIKELSETSDPLLRQEIEAKIGIMAVNLTTATTAIITSSLGIASGFSILLVPLAGISAGIPSLVNNELVLRDKATKVVDYFKHVSLVETEGVFTLLDDKIMMPQDDLVISEIDFNNNSIVLGKCEIWRMEGGSGHTVTDDIDHFFSAPSITYREPHLSIYDVLEVQKEELDLSKDLMVLPNAPNRVFAWETGWTPGLRSLENDGTKLLDRIRDNYEGEFYWRYFAFIADALITTLKPRYEDTNIRINLDSNTRSFIVPIITTEYIREKLSYSFYGSGGTYALSLSQYNMGINIELSESDVWIIDVDNVVRDVTIESDKIKKGDLIEGILSTLSIEENKIILNSHEINFSGEVNGSNGFVSLTFSILEGINAIIEVDLLSKSYKLLISGELKILMLNSNHIQQKIDYIGFNSELQKNIPYSFVDSEGKENGFINGSTKEGLFVSELPDVVLISKVYMDDSKPSFGYYSNNLKDVKVITKDNVNILTGYYLKDDIKISLSLTLQDEKTIKLNSVHLDESGVAEILKFMNRKGNTNTSDSLMSFLESMNIKSIFVNFLQSNIKFILDANFIISGTTSIGQFEFICDENDNIQPYFIKFNTLETNYTLYVGNRQNMIVEPNYDLDDSGDISSTVINFSQKYLYGIDSCVNKVVISPNIYTDEINITPVYETNNTYPEVIVLDANYINEKINVNINDLSIRYVWSNDGNDFILMSTSEENKVSQVKIRFVNVFKDKTLANKLSFNFSDKQDVPVSEIILSFTPSYYEDGLIGYDLGLVSLYNEKFYINNFGMMVSGLIYINDSLYYFKPPVNNLITGFVTVGDDKYYFNPINGGAASIGETIIDDKNYYFNQSGVLQTGVFSTEDGFKYFAPANTLDENLEGEAIDFTGKLIIDENIYYFDDNYRGAVEWKELDGEMHYFSPETGKAFKGLNQIGDDKYYFNSDGVMQKGFVSINDNKHYFDDSGVMKVGYTEIDGKHFYFAENGEMQIGVFNTEDGFKYFAHHNEDLGNEEGEEISYSGILNFNNKIYYFDDSFTAVVGWKDLEDGSKYYFDEDTAEAYIGLSLINDGQYYFNDDGIMQVGFVTINDKVFYFSDSGIIESGVQNIDDNYFYIDDNGIVQIGVFDTSDGYKYFAPANTVNDNIYGQAVEYSGLVRVGEDVYYFGETYTIETGWIYDMENESDKYYFNPETKKACKGINLIDDIKYYFDEKGIMRTGLISFENNNYYFNENGEMQFGYINIEDKMFYFGEDGVMQIGVFNTPDGFKYFAHQNTLDENFEGESINYTGWLDLDEKRYYFTDEYIAATGSVIIDGEEYYFDPDTAQLVISE

SEQ ID NO: 808 - protein, 2366 aa, Clostridium difficile; identical to SEQ ID NO: 115

SEQ ID NO: 809 - protein, 2366 aa, Clostridium difficile; identical to SEQ ID NO: 131

SEQ ID NO: 810 - protein, 2366 aa, Clostridium difficile
MSLVNRKQLEKMANVRFRTQEDEYVAILDALEEYHNMSENTVVEKYLKLKDINSLTDIYIDTYKKSGRNKALKKFKEYLVTEVLELKNNNLTPVEKNLHFVWIGGQINDTAINYINQWKDVNSDYNVNVFYDSNAFLINTLKKTVVESAINDTLESFRENLNDPRFDYNKFFRKRMEIIYDKQKNFINYYKAQREENPELIIDDIVKTYLSNEYSKEIDELNTYIEESLNKITQNSGNDVRNFEEFKNGESFNLYEQELVERWNLAAASDILRISALKEIGGMYLDVDMLPGIQPGLFESIEKPSSVTVDFWEMTKLEAIMKYKEYIPEYTSEHFDMLDEEVQSSFESVLASKSDKSEIFSSLGDMEASPLEVKIAFNSKGIINQGLISVKDSYCSNLIVKQIENRYKILNNSLNPAISEDNDFNTTTNTFIDSIMAEANADNGRFMMELGKYLRVGFFPDVKTTINLSGPEAYAAAYQDLLMFKEGSMNIHLIEADLRNFEISKTNISQSTEQEMASLWSFDDARAKAQFEEYKRNYFEGSLGEDDNLDFSQNIVVDKEYLLEKISSLARSSERGYIHYIVQLQGDKISYEAACNLFAKTPYDSVLFQKNIEDSEIAYYYNPGDGEIQEIDKYKIPSIISDRPKIKLTFIGHGKDEFNTDIFAGFDVDSLSTEIEAAIDLAKEDISPKSIEINLLGCNMFSYSINVEETYPGKLLLKVKDKISELMPSISQDSIIVSANQYEVRINSEGRRELLDHSGEWINKEESIIKDISSKEYISFNPKENKITVKSKNLPELSTLLQEIRNNSNSSDIELEEKVMLTECEINVISNIDTQIVEERIEEAKNLTSDSINYIKDEFKLIESISDALCDLKQQNELEDSHFISFEDISETDEGFSIRFINKETGESIFVETEKTIFSEYANHITEEISKIKGTIFDTVNGKLVKKVNLDTTHEVNTLNAAFFIQSLIEYNSSKESLSNLSVAMKVQVYAQLFSTGLNTITDAAKVVELVSTALDETIDLLPTLSEGLPIIATIIDGVSLGAAIKELSETSDPLLRQEIEAKIGIMAVNLTTATTAIITSSLGIASGFSILLVPLAGISAGIPSLVNNELVLRDKATKVVDYFKHVSLVETEGVFTLLDDKIMMPQDDLVISEIDFNNNSIVLGKCEIWRMEGGSGHTVTDDIDHFFSAPSITYREPHLSIYDVLEVQKEELDLSKDLMVLPNAPNRVFAWETGWTPGLRSLENDGTKLLDRIRDNYEGEFYWRYFAFIADALITTLKPRYEDTNIRINLDSNTRSFIVPIITTEYIREKLSYSFYGSGGTYALSLSQYNMGINIELSESDVWIIDVDNVVRDVTIESDKIKKGDLIEGILSTLSIEENKIILNSHEINFSGEVNGSNGFVSLTFSILEGINAIIEVDLLSKSYKLLISGELKILMLNSNHIQQKIDYIGFNSELQKNIPYSFVDSEGKENGFINGSTKEGLFVSELPDVVLISKVYMDDSKPSFGYYSNNLKDVKVITKDNVNILTGYYLKDDIKISLSLTLQDEKTIKLNSVHLDESGVAEILKFMNRKGNTNTSDSLMSFLESMNIKSIFVNFLQSNIKFILDANFIISGTTSIGQFEFICDENDNIQPYFIKFNTLETNYTLYVGNRQNMIVEPNYDLDDSGDISSTVINFSQKYLYGIDSCVNKVVISPNIYTDEINITPVYETNNTYPEVIVLDANYINEKINVNINDLSIRYVWSNDGNDFILMSTSEENKVSQVKIRFVNVFKDKTLANKLSFNFSDKQDVPVSEIILSFTPSYYEDGLIGYDLGLVSLYNEKFYINNFGMMVSGLIYINDSLYYFKPPVNNLITGFVTVGDDKYYFNPINGGAASIGETIIDDKNYYFNQSGVLQTGVFSTEDGFKYFAPANTLDENLEGEAIDFTGKLIIDENIYYFDDNYRGAVEWKELDGEMHYFSPETGKAFKGLNQIGDYKYYFNSDGVMQKGFVSINDNKHYFDDSGVMKVGYTEIDGKHFYFAENGEMQIGVFNTEDGFKYFAHHNEDLGNEEGEEISYSGILNFNNKIYYFDDSFTAVVGWKDLEDGSKYYFDEDTAEAYIGLSLINDGQYYFNDDGIMQVGFVTINDKVFYFSDSGIIESGVQNIDDNYFYIDDNGIVQIGVFDTSDGYKYFAPANTVNDNIYGQAVEYSGLVRVGEDVYYFGETYTIETGWIYDMENESDKYYFNPETKKACKGINLIDDIKYYFDEKGIMRTGLISFENNNYYFNENGEMQFGYINIEDKMFYFGEDGVMQIGVFNTPDGFKYFAHQNTLDENFEGESINYTGWLDLDEKRYYFTDEYIAATGSVIIDGEEYYFDPDTAQLVISE

SEQ ID NO: 811 - protein, 2367 aa, Clostridium difficile; identical to SEQ ID NO: 126

SEQ ID NO: 812 - protein, 2366 aa, Clostridium difficile; identical to SEQ ID NO: 111

SEQ ID NO: 813 - protein, 2366 aa, Clostridium difficile
MSLVNRKQLEKMANVRFRTQEDEYVAILDALEEYHNMSENTVVEKYLKLKDINSLTDIYIDTYKKSGRNKALKKFKEYLVTEVLELKNNNLTPVEKNLHFVWIGGQINDTAINYINQWKDVNSDYNVNVFYDSNAFLINTLKKTVVESAINDTLESFRENLNDPRFDYNKFFRKRMEIIYDKQKNFINYYKAQREENPELIIDDIVKTYLSNEYSKEIDELNTYIEESLNKITQNSGNDVRNFEEFKNGESFNLYEQELVERWNLAAASDILRISALKEIGGMYLDVDMLPGIQPDLFESIEKPSSVTVDFWEMTKLEAIMKYKEYIPEYTSEHFDMLDEEVQSSFESVLASKSDKSEIFSSLGDMEASPLEVKIAFNSKGIINQGLISVKDSYCSNLIVKQIENRYKILNNSLNPAISEDNDFNTTTNTFIDSIMAEANADNGRFMMELGKYLRVGFFPDVKTTINLSGPEAYAAAYQDLLMFKEGSMNIHLIEADLRNFEISKTNISQSTEQEMASLWSFDDARAKAQFEEYKRNYFEGSLGEDDNLDFSQNIVVDKEYLLEKISSLARSSERGYIHYIVQLQGDKISYEAACNLFAKTPYDSVLFQKNIEDSEIAYYYNPGDGEIQEIDKYKIPSIISDRPKIKLTFIGHGKDEFNTDIFAGFDVDSLSTEIEAAIDLAKEDISPKSIEINLLGCNMFSYSINVEETYPGKLLLKVKDKISELMPSISQDSIIVSANQYEVRINSEGRRELLDHSGEWINKEESIIKDISSKEYISFNPKENKITVKSKNLPELSTLLQEIRNNSNSSDIELEEKVMLTECEINVISNIDTQIVEERIEEAKNLTSDSINYIKDEFKLIESISDALCDLKQQNELEDSHFISFEDISETDEGFSIRFINKETGESIFVETEKTIFSEYANHITEEISKIKGTIFDTVNGKLVKKVNLDTTHEVNTLNAAFFIQSLIEYNSSKESLSNLSVAMKVQVYAQLFSTGLNTITDAAKVVELVSTALDETIDLLPTLSEGLPIIATIIDGVSLGAAIKELSETSDPLLRQEIEAKIGIMAVNLTTATTAIITSSLGIASGFSILLVPLAGISAGIPSLVNNELVLRDKATKVVDYFKHVSLVETEGVFTLLDDKIMMPQDDLVISEIDFNNNSIVLGKCEIWRMEGGSGHTVTDDIDHFFSAPSITYREPHLSIYDVLEVQKEELDLSKDLMVLPNAPNRVFAWETGWTPGLRSLENDGTKLLDRIRDNYEGEFYWRYFAFIADALITTLKPRYEDTNIRINLDSNTRSFIVPIITTEYIREKLSYSFYGSGGTYALSLSQYNMGINIELSESDVWIIDVDNVVRDVTIESDKIKKGDLIEGILSTLSIEENKIILNSHEINFSGEVNGSNGFVSLTFSILEGINAIIEVDLLSKSYKLLISGELKILMLNSNHIQQKIDYIGFNSELQKNIPYSFVDSEGKENGFINGSTKEGLFVSELPDVVLISKVYMDDSKPSFGYYSNNLKDVKVITKDNVNILTGYYLKDDIKISLSLTLQDEKTIKLNSVHLDESGVAEILKFMNRKGSTNTSDSLMSFLESMNIKSIFVNFLQSNIKFILDANFIISGTTSIGQFEFICDENDNIQPYFIKFNTLETNYTLYVGNRQNMIVEPNYDLDDSGDISSTVINFSQKYLYGIDSCVNKVVISPNIYTDEINITPVYETNNTYPEVIVLDANYINEKINVNINDLSIRYVWSNDGNDFILMSTSEENKVSQVKIRFVNVFKDKTLANKLSFNFSDKQDVPVSEIILSFTPSYYEDGLIGYDLGLVSLYNEKFYINNFGMMVSGLIYINDSLYYFKPPVNNLITGFVTVGDDKYYFNPINGGAASIGETIIDDKNYYFNQSGVLQTGVFSTEDGFKYFAPANTLDENLEGEAIDFTGKLIIDENIYYFDDNYRGAVEWKELDGEMHYFSPETGKAFKGLNQIGDDKYYFNSDGVMQKGFVSINDNKHYFDDSGVMKVGYTEIDGKHFYFAENGEMQIGVFNTEDGFKYFAHHNEDLGNEEGEEISYSGILNFNNKIYYFDDSFTAVVGWKDLEDGSKYYFDEDTAEAYIGLSLINDGQYYFNDDGIMQVGFVTINDKVFYFSDSGIIESGVQNIDDNYFYIDDNGIVQIGVFDTSDGYKYFAPANTVNDNIYGQAVEYSGLVRVGEDVYYFGETYTIETGWIYDMENESDKYYFNPETKKACKGINLIDDIKYYFDEKGIMRTGLISFENNNYYFNENGEMQFGYINIEDKMFYFGEDGVMQIGVFNTPDGFKYFAHQNTLDENFEGESINYTGWLDLDEKRYYFTDEYIAATGSVIIDGEEYYFDPDTAQLVISE

SEQ ID NO: 814 - protein, 2366 aa, Clostridium difficile; identical to SEQ ID NO: 114

SEQ ID NO: 815 - protein, 2366 aa, Clostridium difficile; identical to SEQ ID NO: 179

SEQ ID NO: 816 - protein, 2366 aa, Clostridium difficile
MSLVNRKQLEKMANVRFRTQEDEYVAILDALEEYHNMSENTVVEKYLKLKDINSLTDIYIDTYKKSGRNKALKKFKEYLVIEVLELKNNNLTPVEKNLHFVWIGGQINDTAINYINQWKDVNSDYNVNVFYDSNAFLINTLKKTVVESAINDTLESFRENLNDPRFDYNKFFRKRMEIIYDKQKNFINYYKAQREENPELIIDDIVKTYLSNEYSKEIDELNTYIEESLNKITQNSGNDVRNFEEFKNGESFNLYEQELVERWNLAAASDILRISALKEIGGMYLDVDMLPGIQPDLFESIEKPSSVTVDFWEMTKLEAIMKYKEYIPEYTSEHFDMLDEEVQSSFESVLASKSDKSEIFSSLGDMEASPLEVKIAFNSKGIINQGLISVKDSYCSNLIVKQIENRYKILNNSLNPAISEDNDFNTTTNTFIDSIMAEANADNGRFMMELGKYLRVGFFPDVKTTINLSGPEAYAAAYQDLLMFKEGSMNIHLIEADLRNFEISKTNISQSTEQEMASLWSFDDARAKAQFEEYKRNYFEGSLGEDDNLDFSQNIVVDKEYLLEKISSLARSSERGYIHYIVQLQGDKISYEAACNLFAKTPYDSVLFQKNIEDSEIAYYYNPGDGEIQEIDKYKIPSIISDRPKIKLTFIGHGKDEFNTDIFAGFDVDSLSTEIEAAIDLAKEDISPKSIEINLLGCNMFSYSINVEETYPGKLLLKVKDKISELMPSISQDSIIVSANQYEVRINSEGRRELLDHSGEWINKEESIIKDISSKEYISFNPKENKITVKSKNLPELSTLLQEIRNNSNSSDIELEEKVMLTECEINVISNIDTQIVEERIEEAKNLTSDSINYIKDEFKLIESISDALCDLKQQNELEDSHFISFEDISETDEGFSIRFINKETGESIFVETEKTIFSEYANHITEEISKIKGTIFDTVNGKLVKKVNLDTTHEVNTLNAAFFIQSLIEYNSSKESLSNLSVAMKVQVYAQLFSTGLNTITDAAKVVELVSTALDETIDLLPTLSEGLPIIATIIDGVSLGAAIKELSETSDPLLRQEIEAKIGIMAVNLTTATTAIITSSLGIASGFSILLVPLAGISAGIPSLVNNELVLRDKATKVVDYFKHVSLVETEGVFTLLDDKIMMPQDDLVISEIDFNNNSIVLGKCEIWRMEGGSGHTVTDDIDHFFSAPSITYREPHLSIYDVLEVQKEELDLSKDLMVLPNAPNRVFAWETGWTPGLRSLENDGTKLLDRIRDNYEGEFYWRYFAFIADALITTLKPRYEDTNIRINLDSNTRSFIVPIITTEYIREKLSYSFYGSGGTYALSLSQYNMGINIELSESDVWIIDVDNVVRDVTIESDKIKKGDLIEGILSTLSIEENKIILNSHEINFSGEVNGSNGFVSLTFSILEGINAIIEVDLLSKSYKLLISGELKILMLNSNHIQQKIDYIGFNSELQKNIPYSFVDSEGKENGFINGSTKEGLFVSELPDVVLISKVYMDDSKPSFGYYSNNLKDVKVITKDNVNILTGYYLKDDIKISLSLTLQDEKTIKLNSVHLDESGVAEILKFMNRKGSTNTSDSLMSFLESMNIKSIFVNFLQSNIKFILDANFIISGTTSIGQFEFICDENDNIQPYFIKFNTLETNYTLYVGNRQNMIVEPNYDLDDSGDISSTVINFSQKYLYGIDSCVNKVVISPNIYTDEINITPVYETNNTYPEVIVLDANYINEKINVNINDLSIRYVWSNDGNDFILMSTSEENKVSQVKIRFVNVFKDKTLANKLSFNFSDKQDVPVSEIILSFTPSYYEDGLIGYDLGLVSLYNEKFYINNFGMMVSGLIYINDSLYYFKPPVNNLITGFVTVGDDKYYFNPINGGAASIGETIIDDKNYYFNQSGVLQTGVFSTEDGFKYFAPANTLDENLEGEAIDFTGKLIIDENIYYFDDNYRGAVEWKELDGEMHYFSPETGKAFKGLNQIGDDKYYFNSDGVMQKGFVSINDNKHYFDDSGVMKVGYTEIDGKHFYFAENGEMQIGVFNTEDGFKYFAHHNEDLGNEEGEEISYSGILNFNNKIYYFDDSFTAVVGWKDLEDGSKYYFDEDTAEAYIGLSLINDGQYYFNDDGIMQVGFVTINDKVFYFSDSGIIESGVQNIDDNYFYIDDNGIVQIGVFDTSDGYKYFAPANTVNDNIYGQAVEYSGLVRVGEDVYYFGETYTIETGWIYDMENESDKYYFNPETKKACKGINLIDDIKYYFDEKGIMRTGLISFENNNYYFNENGEMQFGYINIEDKMFYFGEDGVMQIGVFNTPDGFKYFAHQNTLDENFEGESINYTGWLDLDEKRYYFTDEYIAATGSVIIDGEEYYFDPDTAQLVISE

SEQ ID NO: 817 - protein, 2366 aa, Clostridium difficile
MSLVNRKQLEKMANVRFRTQEDEYVAILDALEEYHNMSENTVVEKYLKLKDINSLTDIYIDTYKKSGRNKALKKFKEYLVTEVLELKNNNLTPVEKNLHFVWIGGQINDTAINYINQWKDVNSDYNVNVFYDSNAFLINTLKKTVVESAINDTLESFRENLNDPRFDYNKFFRKRMEIIYDKQKNFINYYKAQREENPELIIDDIVKTYLSNEYSKEIDELNTYIEESLNKITQNSGNDVRNFEEFKNGESFNLYEQELVERWNLAAASDILRISALKEIGGMYLDVDMLPGIQPDLFESIEKPSSVTVDFWEMTKLEAIMKYKEYIPEYTSEHFDMLDEEVQSSFESVLASKSDKSEIFSSLGDMEASPLEVKIAFNSKGIINQGLISVKDSYCSNLIVKQIENRYKILNNSLNPAISEDNDFNTTTNTFIDSIMAEANADNGRFMMELGKYLRVGFFPDVKTTINLSGPEAYAAAYQDLLMFKEGSMNIHLIEADLRNFEISKTNISQSTEQEMASLWSFDDARAKAQFEEYKRNYFEGSLGEDDNLDFSQNIVVDKEYLLEKISSLARSSERGYIHYIVQLQGDKISYEAACNLFAKTPYDSVLFQKNIEDSEIAYYYNPGDGEIQEIDKYKIPSIISDRPKIKLTFIGHGKDEFNTDIFAGFDVDSLSTEIEAAIDLAKEDISPKSIEINLLGCNMFSYSINVEETYPGKLLLKVKDKISELMPSISQDSIIVSANQYEVRINSEGRRELLDHSGEWINKEESIIKDISSKEYISFNPKENKITVKSKNLPELSTLLQEIRNNSNSSDIELEEKVMLTECEINVISNIDTQIVEERIEEAKNLTSDSINYIKDEFKLIESISDALCDLKQQNELEDSHFISFEDISETEEGFSIRFINKETGESIFVETEKTIFSEYANHITEEISKIKGTIFDTVNGKLVKKVNLDTTHEVNTLNAAFFIQSLIEYNSSKESLSNLSVAMKVQVYAQLFSTGLNTITDAAKVVELVSTALDETIDLLPTLSEGLPIIATIIDGVSLGAAIKELSETSDPLLRQEIEAKIGIMAVNLTTATTAIITSSLGIASGFSILLVPLAGISAGIPSLVNNELVLRDKATKVVDYFKHVSLVETEGVFTLLDDKIMMPQDDLVISEIDFNNNSIVLGKCEIWRMEGGSGHTVTDDIDHFFSAPSITYREPHLSIYDVLEVQKEELDLSKDLMVLPNAPNRVFAWETGWTPGLRSLENDGTKLLDRIRDNYEGEFYWRYFAFIADALITTLKPRYEDTNIRINLDSNTRSFIVPIITTEYIREKLSYSFYGSGGTYALSLSQYNMGINIELSESDVWIIDVDNVVRDVTIESDKIKKGDLIEGILSTLSIEENKIILNSHEINFSGEVNGSNGFVSLTFSILEGINAIIEVDLLSKSYKLLISGELKILMLNSNHIQQKIDYIGFNSELQKNIPYSFVDSEGKENGFINGSTKEGLFVSELPDVVLISKVYMDDSKPSFGYYSNNLKDVKVITKDNVNILTGYYLKDDIKISLSLTLQDEKTIKLNSVHLDESGVAEILKFMNRKGNTNTSDSLMSFLESMNIKSIFVNFLQSNIKFILDANFIISGTTSIGQFEFICDENDNIQPYFIKFNTLETNYTLYVGNRQNMIVEPNYDLDDSGDISSTVINFSQKYLYGIDSCVNKVVISPNIYTDEINITPVYETNNTYPEVIVLDANYINEKINVNINDLSIRYVWSNDGNDFILMSTSEENKVSQVKIRFVNVFKDKTLANKLSFNFSDKQDVPVSEIILSFTPSYYEDGLIGYDLGLVSLYNEKFYINNFGMMVSGLIYINDSLYYFKPPVNNLITGFVTVGDDKYYFNPINGGAASIGETIIDDKNYYFNQSGVLQTGVFSTEDGFKYFAPANTLDENLEGEAIDFTGKLIIDENIYYFDDNYRGAVEWKELDGEMHYFSPETGKAFKGLNQIGDDKYYFNSDGVMQKGFVSINDNKHYFDDSGVMKVGYTEIDGKHFYFAENGEMQIGVFNTEDGFKYFAHHNEDLGNEEGEEISYSGILNFNNKIYYFDDSFTAVVGWKDLEDGSKYYFDEDTAEAYIGLSLINDGQYYFNDDGIMQVGFVTINDKVFYFSDSGIIESGVQNIDDNYFYIDDNGIVQIGVFDTSDGYKYFAPANTVNDNIYGQAVEYSGLVRVGEDVYYFGETYTIETGWIYDMENESDKYYFNPETKKACKGINLIDDIKYYFDEKGIMRTGLISFENNNYYFNENGEMQFGYINIEDKMFYFGEDGVMQIGVFNTPDGFKYFAHQNTLDENFEGESINYTGWLDLDEKRYYFTDEYIAATGSVIIDGEEYYFDPDTAQLVISE

SEQ ID NO: 818 - protein, 2367 aa, Clostridium difficile
MSLVNRKQLEKMANVRFRVQEDEYVAILDALEEYHNMSENTVVEKYLKLKDINSLTDTYIDTYKKSGRNKALKKFKEYLVTEILELKNSNLTPVEKNLHFIWIGGQINDTAINYINQWKDVNSDYNVNVFYDSNAFLINTLKKTIIESASNDTLESFRENLNDPEFNHTAFFRKRMQIIYDKQQNFINYYKVQKEENPDLIIDDIVKTYLSNEYSKDIDELNAYIEESLNKVTENSGNDVRNFEEFKTGEVFNLYEQELVERWNLAGASDILRVAILKNIGGVYLDVDMLPGIHPDLFKDINKPDSVKTAVDWEEMQLEAIMKYKEYIPEYTSKHFDTLDEEVQSSFESVLASKSDKSEIFLPLGDIEVSPLEVKIAFAKGSIINQALISAKDSYCSDLLIKQIQNRYKILNDTLGPIISQGNDFNTTMNNFGESLGAIANEENISFIAKIGSYLRVGFYPEANTTITLSGPTIYAGAYKDLLTFKEMSIDTSILSSELRNFEFPKVNISQATEQEKNSLWQFNEERAKIQFEEYKKNYFEGALGEDDNLDFSQNTVTDKEYLLEKISSSTKSSERGYVHYIVQLQGDKISYEAACNLFAKNPYDSILFQKNIEDSEVAYYYNPTDSEIQEIDKYRIPDRISDRPKIKLTLIGHGKAEFNTDIFAGLDVDSLSSEIETIIDLAKADISPKSIEINLLGCNMFSYSVNVEETYPGKLLLRVKDKISELMPSISQDSIIVSANQYEVRINSEGRRELLDHSGEWINKEESIIKDISSKEYISFNPKENKIIVKSKNLPELSTLLQEIRNNSNSSDIELEEKVMLAECEINVISNIDTQVVEERIEEAKSLTSDSINYIKNEFKLIESISDALYDLKQQNELEESHFISFEDISETDEGFSIRFIDKETGESIFVETEKAIFSEYANHITEEISKLKDTIFDTVNGKLVKKVNLDATHEVNTLNAAFFIQSLIEYNSSKESLSNLSVAMKVQVYAQLFSTGLNTITDAAKVVELVSTALDETIDLLPTLSEGLPVIATIIDGVSLGAAIKELSETSDPLLRQEIEAKIGIMAVNLTAATTAIITSSLGIASGFSILLVPLAGISAGIPSLVNNELILRDKATKVVDYFSHISLAESEGAFTSLDDKIMMPQDDLVISEIDFNNNSITLGKCEIWRMEGGSGHTVTNDIDHFFSSPSITYREPHLSIYDVLEVKKEELDLSKDLMVLPNAPNRVFGWETGWTPGLRSLENDGTKLLDRIRDQYEGQFYWRFLAFIADALITTLKPRYEDTNVRINLDSNTRSFIVPIITTEYIREKLSYSFYGSGGTYALSLSQYNMNINIELNENDTWVIDVDNVVRDVTIESDKIKKGDLIENILSKLSIEDNKIILDNHEINFSGTLNGGNGFVSLTFSILEGINAVIEVDLLSKSYKVLISGELKTLMANSNSVQQKIDYIGLNSELQKNIPYSFMDDKGKENGFINCSTKEGLFVSELSDVVLISKVYMDDSKPSFGYYSNNLKDVKVITKDNVNILTGYYLKDDIKISLSLTLQDEKTIKLNSVHLDESGVAEILKFMNRKGSTNTSDSLMSFLESMNIKSIFVNFLQSNIKFILDANFIISGTTSIGQFEFICDKDNNIQPYFIKFNTLETKYTLYVGNRQNMIVEPNYDLDDSGDISSTVINFSQKYLYGIDSCVNKVIISPNIYTDEINITPIYEANNTYPEVIVLDTNYISEKINININDLSIRYVWSNDGSDFILMSTDEENKVSQVKIRFTNVFKGNTISDKISFNFSDKQDVSINKIISTFTPSYYVEGLLNYDLGLISLYNEKFYINNFGMMVSGLVYINDSLYYFKPPIKNLITGFTTIGDDKYYFNPDNGGAASVGETIIDGKNYYFSQNGVLQTGVFSTEDGFKYFAPADTLDENLEGEAIDFTGKLTIDENVYYFGDNYRAAIEWQTLDDEVYYFSTDTGRAFKGLNQIGDDKFYFNSDGIMQKGFVNINDKTFYFDDSGVMKSGYTEIDGKYFYFAENGEMQIGVFNTADGFKYFAHHDEDLGNEEGEALSYSGILNFNNKIYYFDDSFTAVVGWKDLEDGSKYYFDEDTAEAYIGLSLINDGQYYFNDDGIMQVGFVAINDKVFYFSDSGIIESGVQNIDDNYFYIDEKGIVQIGVFDTSDGYKYFAPANTVNDNIYGQAVEYSGLVRVGEDVYYFGETYTIETGWIYDMENESDKYYFDPETKKACKGINTIHDIKYYFDETGIMRTGLITFENNHYYFNEDGEMQYGYLNIEDKMFYFSEDGIMQIGVFNTPDGFKYFAHQNTLDENFEGESINYTGWLDLDEKRYYFTDEYIAATGSVIIDGEEYYFDPDTAQLVISE

SEQ ID NO: 819 - protein, 2367 aa, Clostridium difficile
MSLVNRKQLEKMANVRFRVQEDEYVAILDALEEYHNMSENTVVEKYLKLKDINSLTDTYIDTYKKSGRNKALKKFKEYLVTEILELKNSNLTPVEKNLHFIWIGGQINDTAINYINQWKDVNSDYNVNVFYDSNAFLINTLKKTIIESASNDTLESFRENLNDPEFNHTAFFRKRMQIIYDKQQNFINYYKAQKEENPDLIIDDIVKTYLSNEYSKDIDELNAYIEESLNKVTENSGNDVRNFEEFKTGEVFNLYEQELVERWNLAGASDILRVAILKNIGGVYLDVDMLPGIHPDLFKDINKPDSVKTAVDWEEMQLEAIMKYKEYIPEYTSKHFDTLDEEVQSSFESVLASKSDKSEIFLPLGDIEVSPLEVKIAFAKGSIINQALISAKDSYCSDLLIKQIQNRYKILNDTLGPIISQGNDFNTTMNNFGESLGAIANEENISFIAKIGSYLRVGFYPEANTTITLSGPTIYAGAYKDLLTFKEMSIDTSILSSELRNFEFPKVNISQATEQEKNSLWQFNEERAKIQFEEYKKNYFEGALGEDDNLDFSQNTVIDKEYLLEKISSSTKSSERGYVHYIVQLQGDKISYEAACNLFAKNPYDSILFQKNIEDSEVAYYYNPTDSEIQEIDKYRIPDRISDRPKIKLTLIGHGKAEFNTDIFAGLDVDSLSSEIETIIDLAKADISPKSIEINLLGCNMFSYSVNVEETYPGKLLLRVKDKVSELMPSISQDSIIVSANQYEVRINSEGRRELLDHSGEWINKEESIIKDISSKEYISFNPKENKIIVKSKNLPELSTLLQEIRNNSNSSDIELEEKVMLAECEINVISNIETQVVEERIEEAKSLTSDSINYIKNEFKLIESISDALYDLKQQNELEESHFISFEDISETDEGFSIRFIDKETGESIFVETEKAIFSEYANHITEEISKIKGTIFDTVNGKLVKKVNLDATHEVNTLNAAFFIQSLIEYNSSKESLSNLSVAMKVQVYAQLFSTGLNTITDAAKVVELVSTALDETIDLLPTLSEGLPVIATIIDGVSLGAAIKELSETSDPLLRQEIEAKIGIMAVNLTAATTAIITSSLGIASGFSILLVPLAGISAGIPSLVNNELILRDKATKVVDYFSHISLAESEGAFTSLDDKIMMPQDDLVISEIDFNNNSITLGKCEIWRMEGGSGHTVTDDIDHFFSSPSITYREPHLSIYDVLEVKKEELDLSKDLMVLPNAPNRVFGWETGWTPGLRGLENDGTKLLDRIRDQYEGQFYWRFFAFIADALITTLKPRYEDTNVRISLDSNTRSFIVPVITTEYIREKLSYSFYGSGGTYALSLSQYNMNINIELNENDTWVIDVDNVVRSVTIESDKIKKGDLIENILSKLSIEDNKIILDNHEINFSGTLNGGNGFVSLTFSILEGINAVIEVDLLSKSYKVLISGELKTLMANSNSVQQKIDYIGLNSELQKNIPYSFMDDKGKENGFINCSTKEGLFVSELSDVVLIIKVYMDNSKPPFGYYSNDLKDVKAITKDDVIILTGYYLKDDIKISLSFTIQDKNTIKLNGVYLDENGVAEILKFMNKKGSTNTSDSLMSFLESMNIKSIFIKSLKSNAKLILDTNFIISGTTSIGQFEFICDKDNNIQPYFIKFNTLETKYTLYVGNRQNMIVEPNYDLDDSGDISSTVINFSQKYLYGIDSCVNKVIISPNIYTDEINITPIYEANNTYPEVIVLDTNYISEKINININDLSIRYVWSNDGSDFILMSTDEENKVSQVKIRFTNVFKGNTISDKISFNFSDKQDVSINKIISTFTPSYYVEGLLNYHLGLISLYNEKFYINNFGMMVSGLVYINDSLYYFKPPIKNLITGFTTIGDDKYYFNPDNGGAASVGETIIDGKNYYFSPNGVLQTGVFSTEDGFKYFAPADTLDENLEGEAIDFTGKLIIDENVYYFGDNYRAAIEWQTLDDEVYYFSTDTGRAFKGLNQIGDDKFYFNSDGIMQKGFVNINDKTFYFDDSGVMKSGYTEIDGKHFYFAENGEMQIGVFNTADGFKYFAHHDEDLGNEEGEALSYSGILNFNNKIYYFDDSFTAVVGWKDSEDGSKYYFDEDTAEAYIGISTINDGKYYFNDSGIMQIGFVTINNEVFYFSDSGIVESGMQNIDDNYFYIDENGLVQIGVFDTSDGYKYFAPANTVNDNIYGQAVEYSGLVRVGEDVYYFGETYTIETGWIYDMENESDKYYFDPETKKAYKGINVIDDIKYYFDENGIMRTGLITFEDNHYYFNEDGIMQYGYLNIEDKMFYFSEDGIMQIGVFNTPDGFKYFAHQNTLDENFEGESINYTGWLDLDEKRYYFTDEYIAATGSVIIDGEEYYFDPDTAQLVISE

SEQ ID NO: 820 - protein, 2366 aa, Clostridium difficile
MSLVNRKQLEKMANVRFRTQEDEYVAILDALEEYHNMSENTVVEKYLKLKDINSLTDIYIDTYKKSGRNKALKKFKEYLVTEVLELKNNNLTPVEKNLHFVWIGGQINDTAINYINQWKDVNSDYNVNVFYDSNAFLINTLKKTVVESAINDTLESFRENLNDPRFDYNKFFRKRMEIIYDKQKNFINYYKAQREENPELIIDDIVKTYLSNEYSKEIDELNTYIEESLNKITQNSGNDVRNFEEFKNGESFNLYEQELVERWNLAAASDILRISALKEIGGMYLDVDMLPGIQPDLFESIEKPSSVTVDFWEMTKLEAIMKYKEYIPEYTSEHFDMLDEEVQSSFESVLASKSDKSEIFSSLGDMEASPLEVKIAFNSKGIINQGLISVKDSYCSNLIVKQIENRYKILNNSLNPAISEDNDFNTTTNTFIDSIMAEANADNGRFMMELGKYLRVGFFPDVKTTINLSGPEAYAAAYQDLLMFKEGSMNIHLIEADLRNFEIFKTNISQSTEQEMASLWSFDDARAKAQFEEYKRNYFEGSLGEDDNLDFSQNIVVDKEYLLEKISSLARSSERGYIHYIVQLQGDKISYEAACNLFAKTPYDSVLFQKNIEDSEIAYYYNPGDGEIQEIDKYKIPSIISDRPKIKLTFIGHGKDEFNTDIFAGFDVDSLSTEIEAAIDLAKEDISPKSIEINLLGCNMFSYSINVEETYPGKLLLKVKDKISELMPSISQDSIIVSANQYEVRINSEGRRELLDHSGEWINKEESIIKDISSKEYISFNPKENKITVKSKNLPELSTLLQEIRNNSNSSDIELEEKVMLTECEINVISNIDTQIVEERIEEAKNLTSDSINYIKDEFKLIESISDALCDLKQQNELEDSHFISFEDISETDEGFSIRFINKETGESIFVETEKTIFSEYANHITEEISKIKGTIFDTVNGKLVKKVNLDTTHEVNTLNAAFFIQSLIEYNSSKESLSNLSVAMKVQVYAQLFSTGLNTITDAAKVVELVSTALDETIDLLPTLSEGLPIIATIIDGVSLGAAIKELSETSDPLLRQEIEAKIGIMAVNLTTATTAIITSSLGIASGFSILLVPLAGISAGIPSLVNNELVLRDKATKVVDYFKHVSLVETEGVFTLLDDKIMMPQDDLVISEIDFNNNSIVLGKCEIWRMEGGSGHTVTDDIDHFFSAPSITYREPHLSIYDVLEVQKEELDLSKDLMVLPNAPNRVFAWETGWTPGLRSLENDGTKLLDRIRDNYEGEFYWRYFAFIADALITTLKPRYEDTNIRINLDSNTRSFIVPIITTEYIREKLSYSFYGSGGTYALSLSQYNMGINIELSESDVWIIDVDNVVRDVTIESDKIKKGDLIEGILSTLSIEENKIILNSHEINFSGEVNGSNGFVSLTFSILEGINAIIEVDLLSKSYKLLISGELKILMLNSNHIQQKIDYIGFNSELQKNIPYSFVDSEGKENGFINGSTKEGLFVSELPDVVLISKVYMDDSKPSFGYYSNNLKDVKVITKDNVNILTGYYLKDDIKISLSLTLQDEKTIKLNSVHLDESGVAEILKFMNRKGNTNTSDSLMSFLESMNIKSIFVNFLQSNIKFILDANFIISGTTSIGQFEFICDENDNIQPYFIKFNTLETNYTLYVGNRQNMIVEPNYDLDDSGDISSTVINFSQKYLYGIDSCVNKVVISPNIYTDEINITPVYETNNTYPEVIVLDANYINEKINVNINDLSIRYVWSNDGNDFILMSTSEENKVSQVKIRFVNVFKDKTLANKLSFNFSDKQDVPVSEIILSFTPSYYEDGLIGYDLGLVSLYNEKFYINNFGMMVSGLIYINDSLYYFKPPVNNLITGFVTVGDDKYYFNPINGGAASIGETIIDDKNYYFNQSGVLQTGVFSTEDGFKYFAPANTLDENLEGEAIDFTGKLIIDENIYYFDDNYRGAVEWKELDGEMHYFSPETGKAFKGLNQIGDYKYYFNSDGVMQKGFVSINDNKHYFDDSGVMKVGYTEIDGKHFYFAENGEMQIGVFNTEDGFKYFAHHNEDLGNEEGEEISYSGILNFNNKIYYFDDSFTAVVGWKDLEDGSKYYFDEDTAEAYIGLSLINDGQYYFNDDGIMQVGFVTINDKVFYFSDSGIIESGVQNIDDNYFYIDDNGIVQIGVFDTSDGYKYFAPANTVNDNIYGQAVEYSGLVRVGEDVYYFGETYTIETGWIYDMENESDKYYFNPETKKACKGINLIDDIKYYFDEKGIMRTGLISFENNNYYFNENGEMQFGYINIEDKMFYFGEDGVMQIGVFNTPDGFKYFAHQNTLDENFEGESINYTGWLDLDEKRYYFTDEYIAATGSVIIDGEEYYFDPDTAQLVISE

SEQ ID NO: 821 - protein, 2366 aa, Clostridium difficile
MSLVNRKQLEKMANVRFRTQEDEYVAILDALEEYHNMSENTVVEKYLKLKDINSLTDIYIDTYKKSGRNKALKKFKEYLVTEVLELKNNNLTPVEKNLHFVWIGGQINDTAINYINQWKDVNSDYNVNVFYDSNAFLINTLKKTVVESAINDTLESFRENLNDPRFDYNKFFRKRMEIIYDKQKNFINYYKAQREENPELIIDDIVKTYLSNEYSKEIDELNTYIEESLNKITQNSGNDVRNFEEFKNGESFNLYEQELVERWNLAAASDILRISALKEIGGMYLDVDMLPGIQPDLFESIEKPSSVTVDFWEMTKLEAIMKYKEYIPEYTSEHFDMLDEEVQSSFESVLASKSDKSEIFSSLGDMEASPLEVKIAFNSKGIINQGLISVKDSYCSNLIVKQIENRYKILNNSLNPAISEDNDFNTTTNTFIDSIMAEANADNGRFMMELGKYLRVGFFPDVKTTINLSGPEAYAAAYQDLLMFKEGSMNIHLIEADLRNFEISKTNISQSTEQEMASLWSFDDARAKAQFEEYKRNYFEGSLGEDDNLDFSQNIVVDKEYLLEKISSLARSSERGYIHYIVQLQGDKISYEAACNLFAKTPYDSVLFQKNIEDSEIAYYYNPGDGEIQEIDKYKIPSIISDRPKIKLTFIGHGKDEFNTDIFAGFDVDSLSTEIEAAIDLAKEDISPKSIEINLLGCNMFSYSINVEETYPGKLLLKVKDKISELMPSISQDSIIVSANQYEVRINSEGRRELLDHSGEWINKEESIIKDISSKEYISFNPKENKITVKSKNLPELSTLLQEIRNNSNSSDIELEEKVMLTECEINVISNIDTQIVEERIEEAKNLTSDSINYIKDEFKLIESISDALCDLKQQNELEDSHFISFEDISETDEGFSIRFINKETGESIFVETEKTIFSEYANHITEEISKIKGTIFDTVNGKLVKKVNLDTTHEVNTLNAAFFIQSLIEYNSSKESLSNLSVAMKVQVYAQLFSTGLNTITDAAKVVELVSTALDETIDLLPTLSEGLPIIATIIDGISLGAAIKELSETSDPLLRQEIEAKIGIMAVNLTTATTAIITSSLGVASGFSILLVPLAGISAGIPSLVNNELVLRDKATKVVDYFKHVSLVETEGVFTLLDDKIMMPQDDLVISEIDFNNNSIVLGKCEIWRMEGGSGHTVTDDIDHFFSAPSITYREPHLSIYDVLEVQKEELDLSKDLMVLPNAPNRVFAWETGWTPGLRSLENDGTKLLDRIRDNYEGEFYWRYFAFIADALITTLKPRYEDTNIRINLDSNTRSFIVPIITTEYIREKLSYSFYGSGGTYALSLSQYNMGINIELSESDVWIIDVDNVVRDVTIESDKIKKGDLIEGILSTLSIEENKIILNSHEINFSGEVNGSNGFVSLTFSILEGINAIIEVDLLSKSYKLLISGELKILMLNSNHIQQKIDYIGFNSELQKNIPYSFVDSEGKENGFINGSTKEGLFVSELPDVVLISKVYMDDSKPSFGYYSNNLKDVKVITKDNVNILTGYYLKDDIKISLSLTLQDEKTIKLNSVHLDESGVAEILKFMNRKGNTNTSDSLMSFLESMNIKSIFVNFLQSNIKFILDANFIISGTTSIGQFEFICDENDNIQPYFIKFNTLETNYTLYVGNRQNMIVEPNYDLDDSGDISSTVINFSQKYLYGIDSCVNKVVISPNIYTDEINITPVYETNNTYPEVIVLDANYINEKINVNINDLSIRYVWSNDGNDFILMSTSEENKVSQVKIRFVNVFKDKTLANKLSFNFSDKQDVPVSEIILSFTPSYYEDGLIGYDLGLVSLYNEKFYINNFGMMVSGLIYINDSLYYFKPPVNNLITGFVTVGDDKYYFNPINGGAASIGETIIDDKNYYFNQSGVLQTGVFSTEDGFKYFAPANTLDENLEGEAIDFTGKLIIDENIYYFDDNYRGAVEWKELDGEMHYFSPETGKAFKGLNQIGDYKYYFNSDGVMQKGFVSINDNKHYFDDSGVMKVGYTEIDGKHFYFAENGEMQIGVFNTEDGFKYFAHHNEDLGNEEGEEISYSGILNFNNKIYYFDDSFTAVVGWKDLEDGSKYYFDEDTAEAYIGLSLINDGQYYFNDDGIMQVGFVTINDKVFYFSDSGIIESGVQNIDDNYFYIDDNGIVQIGVFDTSDGYKYFAPANTVNDNIYGQAVEYSGLVRVGEDVYYFGETYTIETGWIYDMENESDKYYFNPETKKACKGINLIDDIKYYFDEKGIMRTGLISFENNNYYFNENGEMQFGYINIEDKMFYFGEDGVMQIGVFNTPDGFKYFAHQNTLDENFEGESINYTGWLDLDEKRYYFTDEYIAATGSVIIDGEEYYFDPDTAQLVISE

SEQ ID NO: 822 - protein, 2366 aa, Clostridium difficile
MSLVNRKQLEKMANVRFRTQEDEYVAILDALEEYHNMSENTVVEKYLKLKDINSLTDIYIDTYKKSGRNKALKKFKEYLVTEVLELKNNNLTPVEKNLHFVWIGGQINDTAINYINQWKDVNSDYNVNVFYDSNAFLINTLKKTVVESAINDTLESFRENLNDPRFDYNKFFRKRMEIIYDKQKNFINYYKAQREENPELIIDDIVKTYLSNEYSKEIDELNTYIEESLNKITQNSGNDVRNFEEFKNGESFNLYEQELVERWNLAAASDILRISALKEIGGMYLDVDMLPGIQPDLFESIEKPSSVTVDFWEMTKLEAIMKYKEYIPEYTSEHFDMLDEEVQSSFESVLASKSDKSEIFSSLGDMEASPLEVKIAFNSKGIINQGLISVKDSYCSNLIVKQIENRYKILNNSLNPAISEDNDFNTTTNTFIDSIMAEANADNGRFMMELGKYLRVGFFPDVKTTINLSGPEAYAAAYQDLLMFKEGSMNIHLIEADLRNFEISKTNISQSTEQEMASLWSFDDARAKAQFEEYKRNYFEGSLGEDDNLDFSQNIVVDKEYLLEKISSLARSSERGYIHYIVQLQGDKISYEAACNLFAKTPYDSVLFQKNIEDSEIAYYYNPGDGEIQEIDKYKIPSIISDRPKIKLTFIGHGKDEFNTDIFAGFDVDSLSTEIEAAIDLAKEDISPKSIEINLLGCNMFSYSINVEETYPGKLLLKVKDKISELMPSISQDSIIVSANQYEVRINSEGRRELLDHSGEWINKEESIIKDISSKEYISFNPKENKITVKSKNLPELSTLLQEIRNNSNSSDIELEEKVMLTECEINVISNIDTQIVEERIEEAKNLTSDSINYIKDEFKLIESISDALCDLKQQNELEDSHFISFEDISETEEGFSIRFINKETGESIFVETEKTIFSEYANHITEEISKIKGTIFDTVNGKLVKKVNLDTTHEVNTLNAAFFIQSLIEYNSSKESLSNLSVAMKVQVYAQLFSTGLNTITDAAKVVELVSTALDETIDLLPTLSEGLPIIATIIDGVSLGAAIKELSETSDPLLRQEIEAKIGIMAVNLTTATTAIITSSLGIASGFSILLVPLAGISAGIPSLVNNELVLRDKATKVVDYFKHVSLVETEGVFTLLDDKVMMPQDDLVISEIDFNNNSIVLGKCEIWRMEGGSGHTVTDDIDHFFSAPSITYREPHLSIYDVLEVQKEELDLSKDLMVLPNAPNRVFAWETGWTPGLRSLENDGTKLLDRIRDNYEGEFYWRYFAFIADALITTLKPRYEDTNIRINLDSNTRSFIVPIITTEYIREKLSYSFYGSGGTYALSLSQYNMGINIELSESDVWIIDVDNVVRDVTIESDKIKKGDLIEGILSTLSIEENKIILNSHEINFSGEVNGSNGFVSLTFSILEGINAIIEVDLLSKSYKLLISGELKILMLNSNHIQQKIDYIGFNSELQKNIPYSFVDSEGKENGFINGSTKEGLFVSELPDVVLISKVYMDDSKLSFGYYSNNLKDVKVITKDNVNILTGCYLKDDIKISLSLTLQDEKTIKLNSVHLDESGVAEILKFMNRKGSTNTSDSLMSFLESMNIKSIFVNLLQSNIKFILDANFIISGTTSIGQFEFICDENDNIQPYFIKFNTLETNYTLYVGNRQNMIVEPNYDLDDSGDISSTVINFSQKYLYGIDSCVNKVVISPNIYTDEINITPVYETNNTYPEVVVLDANYINEKINVNINDLSIRYVWSNDGNDFILMSTSEENKVSQVKIRFVNVFKDKTLANKLSFNFSDKQDVPVSEIILSFTPSYYEDGLIGYDLGLVSLYNEKFYINNFGMMVSGLIYINDSLYYFKPPVNNLITGFVTVGDDKYYFNPINGGAASIGETIIDDKNYYFNQSGVLQTGVFSTEDGFKYFAPANTLDENLEGEAIDFTGKLIIDENIYYFEDNYRGAVEWKELDGEMHYFSPETGKAFKGLNQIGDDKYYFNSDGVMQKGFVSINDNKHYFDDSGVMKVGYTEIDGKHFYFAENGEMQIGVFNTEDGFKYFAHHNEDLGNEEGEEISYSGILNFNNKIYYFDDSFTAVVGWKDLEDGSKYYFDEDTAEAYIGLSLINDGQYYFNDDGIMQVGFVTINDKVFYFSDSGIIESGVQNIDDNYFYIDDNGIVQIGVFDTSDGYKYFAPANTVNDNIYGQAVEYSGLVRVGEDVYYFGETYTIETGWIYDMENESDKYYFNPETKKACKGINLIDDIKYYFDEKGIMRTGLISFENNNYYFNENGEMQFGYINIEDKMFYFGEDGVMQIGVFNTPDGFKYFAHQNTLDENFEGESINYTGWLDLDEKRYYFTDEYIAATGSVIIDGEEYYFDPDTAQLVISE

SEQ ID NO: 823 - protein, 2366 aa, Clostridium difficile
MSLVNRKQLEKMANVRFRTQEDEYVAILDALEEYHNMSENTVVEKYLKLKDINSLTDIYIDTYKKSGRNKALKKFKEYLVTEVLELKNNNLTPVEKNLHFVWIGGQINDTAINYINQWKDVNSDYNVNVFYDSNAFLINTLKKTVVESAINDTLESFRENLNDPRFDYNKFFRKRMEIIYDKQKNFINYYKAQREENPELIIDDIVKTYLSNEYSKEIDELNTYIEESLNKITQNSGNDVRNFEEFKNGESFNLYEQELVERWNLAAASDILRISALKEIGGMYLDVDMLPGIQPDLFESIEKPSSVTVDFWEMTKLEAIMKYKEYIPEYTSEHFDMLDEEVQSSFESVLASKSDKSEIFSSLGDMEASPLEVKIAFNSKGIINQGLISVKDSYCSNLIVKQIENRYKILNNSLNPAISEDNDFNTTTNTFIDSIMAEANADNGRFMMELGKYLRVGFFPDVKTTINLSGPEAYAAAYQDLLMFKEGSMNIHLIEADLRNFEISKTNISQSTEQEMASLWSFDDARAKAQFEEYKRNYFEGSLGEDDNLDFSQNIVVDKEYLLEKISSLARSSERGYIHYIVQLQGDKISYEAACNLFAKTPYDSVLFQKNIEDSEIAYYYNPGDGEIQEIDKYKIPSIISDRPKIKLTFIGHGKDEFNTDIFAGFDVDSLSTEIEAAIDLAKEDISPKSIEINLLGCNMFSYSINVEETYPGKLLLKVKDKISELMPSISQDSIIVSANQYEVRINSEGRRELLDHSGEWINKEESIIKDISSKEYISFNPKENKITVKSKNLPELSTLLQEIRNNSNSSDIELEEKVMLTECEINVISNIDTQIVEERIEEAKNLTSDSINYIKDEFKLIESISDALCDLKQQNELEDSHFISFEDISETEEGFSIRFINKETGESIFVETEKTIFSEYANHITEEISKIKGTIFDTVNGKLVKKVNLDTTHEVNTLNAAFFIQSLIEYNSSKESLSNLSVAMKVQVYAQLFSTGLNTITDAAKVVELVSTALDETIDLLPTLSEGLPIIATIIDGVSLGAAIKELSETSDPLLRQEIEAKIGIMAVNLTTATTAIITSSLGIASGFSILLVPLAGISAGIPSLVNNELVLRDKATKVVDYFKHVSLVETEGVFTLLDDKIMMPQDDLVISEIDFNNNSIVLGKCEIWRMEGGSGHTVTDDIDHFFSAPSITYREPHLSIYDVLEVQKEELDLSKDLMVLPNAPNRVFAWETGWTPGLRSLENDGTKLLDRIRDNYEGEFYWRYFAFIADALITTLKPRYEDTNIRINLDSNTRSFIVPIITTEYIREKLSYSFYGSGGTYALSLSQYNMGINIELSESDVWIIDVDNVVRDVTIESDKIKKGDLIEGILSTLSIEENKIILNSHEINFSGDVNGSNGFVSLTFSILEGINAIIEVDLLSKSYKLLISGELKILMLNSNHIQQKIDYIGFNSELQKNIPYSFVDSEGKENGFINGSTKEGLFVSELPDVVLISKVYMDDSKPSFGYYSNNLKDVKVITKDNVNILTGYYLKDDIKISLSLTLQDEKTIKLNSVHLDESGVAEILKFMNRKGNTNTSDSLMSFLESMNIKSIFVNFLQSNIKFILDANFIISGTTSIGQFEFICDENDNIQPYFIKFNTLETNYTLYVGNRQNMIVEPNYDLDDSGDISSTVINFSQKYLYGIDSCVNKVVISPNIYTDEINITPVYETNNTYPEVIVLDANYINEKINVNINDLSIRYVWSNDGNDFILMSTSEENKVSQVKIRFVNVFKDKTLANKLSFNFSDKQDVPISEIILSFTPSYYEDGLIGYDLGLVSLYNEKFYINNFGMMVSGLIYINDSLYYFKPPVNNLITGFVTVGDDKYYFNPINGGAASIGETIIDDKNYYFNQSGVLQTGVFSTEDGFKYFAPANTLDENLEGEAIDFTGKLIIDENIYYFEDNYRGAVEWKELDGEMHYFSPETGKAFKGLNQIGDDKYYFNSDGVMQKGFVSINDNKHYFDDSGVMKVGYTEIDGKYFYFAENGEMQIGVFNTEDGFKYFAHHNEDLGNEEGEEISYSGILNFNNKIYYFDDSFTAVVGWKDLEDGSKYYFDEDTAEAYIGLSLINDGQYYFNDDGIMQVGFVTINDKVFYFSDSGIIESGVQNIDDNYFYIDEKGIVQIGVFDTSDGYKYFAPANTVNDNIYGQAVEYSGLVRVGEDVYYFGETYTIETGWIYDMENESDKYYFNPETKKACKGINLIDDIKYYFDEKGIMRTGLISFENNNYYFNENGEMQFGYINIEDKMFYFGEDGVMQIGVFNTPDGFKYFAHQNTLDENFEGESINYTGWLDLDEKRYYFTDEYIAATGSVIIDGEEYYFDPDTAQLVISE

SEQ ID NO: 824 - protein, 2366 aa, Clostridium difficile
MSLVNRKQLEKMANVRFRTQEDEYVAILDALEEYHNMSENTVVEKYLKLKDINSLTDIYIDTYKKSGRNKALKKFKEYLVTEVLELKNNNLTPVEKNLHFVWIGGQINDTAINYINQWKDVNSDYNVNVFYDSNAFLINTLKKTIVESATNDTLESFRENLNDPRFDYNKFYRKRMEIIYDKQKNFINYYKTQREENPDLIIDDIVKIYLSNEYSKDIDELNSYIEESLNKVTENSGNDVRNFEEFKGGESFKLYEQELVERWNLAAASDILRISALKEVGGVYLDVDMLPGIQPDLFESIEKPSSVTVDFWEMVKLEAIMKYKEYIPGYTSEHFDMLDEEVQSSFESVLASKSDKSEIFSSLGDMEASPLEVKIAFNSKGIINQGLISVKDSYCSNLIVKQIENRYKILNNSLNPAISEDNDFNTTTNAFIDSIMAEANADNGRFMMELGKYLRVGFFPDVKTTINLSGPEAYAAAYQDLLMFKEGSMNIHLIEADLRNFEISKTNISQSTEQEMASLWSFDDARAKAQFEEYKKNYFEGSLGEDDNLDFSQNTVVDKEYLLEKISSLARSSERGYIHYIVQLQGDKISYEAACNLFAKTPYDSVLFQKNIEDSEIAYYYNPGDGEIQEIDKYKIPSIISDRPKIKLTFIGHGKDEFNTDIFAGLDVDSLSTEIETAIDLAKEDISPKSIEINLLGCNMFSYSVNVEETYPGKLLLRVKDKISELMPSISQDSIIVSANQYEVRINSEGRRELLDHSGEWINKEESIIKDISSKEYISFNPKENKIIVKSKNLPELSTLLQEIRNNSNSSDIELEEKVMLAECEINVISNIDTQVVEERIEEAKSLTSDSINYIKNEFKLIESISDALYDLKQQNELEESHFISFEDISETDEGFSIRFIDKETGESIFVETEKAIFSEYANHITEEISKIKGTIFDTVNGKLVKKVNLDATHEVNTLNAAFFIQSLIEYNSSKESLSNLSVAMKVQVYAQLFSTGLNTITDAAKVVELVSTALDETIDLLPTLSEGLPVIATIIDGVSLGAAIKELSETSDPLLRQEIEAKIGIMAVNLTAATTAIITSSLGIASGFSILLVPLAGISAGIPSLVNNELILRDKATKVVDYFSHISLAESEGAFTSLDDKIMMPQDDLVISEIDFNNNSITLGKCEIWRMEGGSGHTVTDDIDHFFSSPSITYREPHLSIYDVLEVKKEELDLSKDLMVLPNAPNRVFGWETGWTPGLRGLENDGTKLLDRIRDQYEGQFYWRFFAFIADALITTLKPRYEDTNVRISLDSNTRSFIVPVITTEYIREKLSYSFYGSGGTYALSLSQYNMNINIELNENDTWVIDVDNVVRDVTIESDKIKKGDLIENILSKLSIEDNKIILDNHEINFSGTLNGGNGFVSLTFSILEGINAVIEVDLLSKSYKVLISGELKTLMANSNSVQQKIDYIGLNSELQKNIPYSFMDDKGKENGFINCSTKEGLFVSELSDVVLIIKVYMDNSKPPFGYYSNDLKDVKAITKDDVIILTGYYLKDDIKISLSFTIQDENTIKLNGVYLDENGVAEILKFMNKKGSTNTSDSLMSFLESMNIKSIFINSLQSNTKLILDTNFIISGATSIGQFEFICDKDNNIQPYFIKFNTLETKYTLYVGNRQNMIVEPNYDLDDSGDISSTVINFSQKYLYGIDSCVNKVIISPNIYTDEINITPIYEANNTYPEVIVLDTNYISEKINININDLSIRYVWSNDGSDFILMSTDEENKVSQVKIRFTNVFKGNTISDKISFNFSDKQDVSINKIISTFTPSYYVEGLLNYHLGLISLYNEKFYINNFGMMVSGLVYINDSLYYFKPPIKNLITGFTTIGDDKYYFNPDNGGAASVGETIIDGKNYYFSQNGVLQTGVFSTEDGFKYFAPADTLDENLEGEAIDFTGKLTIDENVYYFGDNYRAAIEWQTLDDEVYYFSTDTGRAFKGLNQIGDDKFYFNSDGIMQKGFVNINDKTFYFDDSGVMKSGYTEIDGKYFYFAENGEMQIGVFNTADGFKYFAHHDEDLGNEEGEALSYSGILNFNNKIYYFDDSFTAVVGWKDLEDGSKYYFDEDTAEAYIGISIINDGKYYFNDSGIMQIGFVTINNEVFYFSDSGIVESGMQNIDDNYFYIDENGLVQIGVFDTSDGYKYFAPANTVNDNIYGQAVEYSGLVRVGEDVYYFGETYTIETGWIYDMENESDKYYFDPETKKAYKGINVIDDIKYYFDENGIMRTGLITFEDNHYYFNEDGIMQYGYINIEDKMFYFNEDGVMQIGVFNTADGFKYFAHQNTLDENFEGESINYTGWLDLDEKRYYFTDEYIAAIGSVIIDGEEYYFDPDTAELVISE

SEQ ID NO: 825 - protein, 2366 aa, Clostridium difficile
MSLVNRKQLEKMANVRFRTQEDEYVAILDALEEYHNMSENTVVEKYLKLKDINSLTDIYIDTYKKSGRNKALKKFKEYLVTEVLELKNNNLTPVEKNLHFVWIGGQINDTAINYINQWKDVNSDYNVNVFYDSNAFLINTLKKTVVESAINDTLESFRENLNDPRFDYNKFFRKRMEIIYDKQKNFINYYKAQREENPELIIDDIVKTYLSNEYSKEIDELNTYIEESLNKITQNSGNDVRNFEEFKNGESFNLYEQELVERWNLAAASDILRISALKEIGGMYLDVDMLPGIQPDLFESIEKPSSVTVDFWEMTKLEAIMKYKEYIPEYTSEHFDMLDEEVQSSFESVLASKSDKSEIFSSLGDMEASPLEVKIAFNSKGIINQGLISVKDSYCSNLIVKQIENRYKILNNSLNPAISEDNDFNTTTNTFIDSIMAEANADNGRFMMELGKYLRVGFFPDVKTTINLSGPEAYAAAYQDLLMFKEGSMNIHLIEADLRNFEISKTNISQSTEQEMASLWSFDDARAKAQFEEYKRNYFEGSLGEDDNLDFSQNIVVDKEYLLEKISSLARSSERGYIHYIVQLQGDKISYEAACNLFAKTPYDSVLFQKNIEDSEIAYYYNPGDGEIQEIDKYKIPSIISDRPKIKLTFIGHGKDEFNTDIFAGFDVDSLSTEIEAAIDLAKEDISPKSIEINLLGCNMFSYSINVEETYPGKLLLKVKDKISELMPSISQDSIIVSANQYEVRINSEGRRELLDHSGEWINKEESIIKDISSKEYISFNPKENKITVKSKNLPELSTLLQEIRNNSNSSDIELEEKVMLTECEINVISNIDTQIVEERIEEAKNLTSDSINYIKDEFKLIESISDALCDLKQQNELEDSHFISFEGISETDEGFSIRFINKETGESIFVETEKTIFSEYANHITEEISKIKGTIFDTVNGKLVKKVNLDTTHEVNTLNAAFFIQSLIEYNSSKESLSNLSVAMKVQVYAQLFSTGLNTITDAAKVVELVSTALDETIDLLPTLSEGLPIIATIIDGVSLGAAIKELSETSDPLLRQEIEAKIGIMAVNLTTATTAIITSSLGVASGFSILLVPLAGISAGIPSLVNNELVLRDKATKVVDYFKHVSLVETEGVFTLLDDKIMMPQDDLVISEIDFNNNSIVLGKCEIWRMEGGSGHTVTDDIDHFFSAPSITYREPHLSIYDVLEVQKEELDLSKDLMVLPNAPNRVFAWETGWTPGLRSLENDGTKLLDRIRDNYEGEFYWRYFAFIADALITTLKPRYEDTNIRINLDSNTRSFIVPIITTEYIREKLSYSFYGSGGTYALSLSQYNMGINIELSESDVWIIDVDNVVRDVTIESDKIKKGDLIEGILSTLSIEENKIILNSHEINFSGEVNGSNGFVSLTFSILEGINAIIEVDLLSKSYKLLISGELKILMLNSNHIQQKIDYIGFNSELQKNIPYSFVDSEGKENGFINGSTKEGLFVSELPDVVLISKVYMDDSKPSFGYYSNNLKDVKVITKDNVNILTGYYLKDDIKISLSLTLQDEKTIKLNSVHLDESGVAEILKFMNRKGNTNTSDSLMSFLESMNIKSIFVNFLQSNIKFILDANFIISGTTSIGQFEFICDENDNIQPYFIKFNTLETNYTLYVGNRQNMIVEPNYDLDDSGDISSTVINFSQKYLYGIDSCVNKVVISPNIYTDEINITPVYETNNTYPEVIVLDANYINEKINVNINDLSIRYVWSNDGNDFILMSTSEENKVSQVKIRFVNVFKDKTLANKLSFNFSDKQDVPVSEIILSFTPSYYEDGLIGYDLGLVSLYNEKFYINNFGMMVSGLIYINDSLYYFKPPVNNLITGFVTVGDDKYYFNPINGGAASIGETIIDDKNYYFNQSGVLQTGVFSTEDGFKYFAPANTLDENLEGEAIDFTGKLIIDENIYYFDDNYRGAVEWKELDGEMHYFSPETGKAFKGLNQIGDYKYYFNSDGVMQKGFVSINDNKHYFDDSGVMKVGYTEIDGKHFYFAENGEMQIGVFNTEDGFKYFAHHNEDLGNEEGEEISYSGILNFNNKIYYFDDSFTAVVGWKDLEDGSKYYFDEDTAEAYIGLSLINDGQYYFNDDGIMQVGFVTINDKVFYFSDSGIIESGVQNIDDNYFYIDDNGIVQIGVFDTSDGYKYFAPANTVNDNIYGQAVEYSGLVRVGEDVYYFGETYTIETGWIYDMENESDKYYFNPETKKACKGINLIDDIKYYFDEKGIMRTGLISFENNNYYFNENGEMQFGYINIEDKMFYFGEDGVMQIGVFNTPDGFKYFAHQNTLDENFEGESINYTGWLDLDEKRYYFTDEYIAATGSVIIDGEEYYFDPDTAQLVISE

SEQ ID NO: 826 - protein, 2366 aa, Clostridium difficile
MSLVNRKQLEKMANVKFRTQEDEYVAILDALEEYHNMSENTVVEKYLKLKDINSLTDAYIDTYKKSGRNKALKKFKEYLTTEVIELKNSNLTPVEKNLHFVWIGGQISDTAINYINQWKDVNSDYNTNVFYDSNAFLINTLKKTIVEATTNDTLESFSENLNDPRFDHNNFYRKRMEMIYDKQKNFINYYKAQREENPELIIDDIVKTYLSNEYSKEIDELNAYIEESLNKITQNSGNDVRNFEEFKNGESFKLYEQELVERWNLAAASDILRISALKEIGGVYLDVDMLPGIQPDLFESIEKPSSVTVDFWEMTKLEAIMKYKEYIPGYTSEHFDMLDEEVQSSFESALASKSDKSEIFSSLGDMEASPLEVKIAFNSKGIINQGLISVKDSYCSNLIVKQIENRYKILNNSLNPAISEDNDFNTTTNTFIDSIMAEANADNGRFMMELGKYLRVGFFPDVKTTINLSGPEAYAAAYQDLLMFKEDSMNIHLIEADLRNFEISKTNISQSTEQEMASLWSFDDARAKAQFEEYKRNYFEGALGEDDNLDFSQNTVVDKEYLLEKISSLARSSERGYIHYIVQLQGDKISYEAACNLFAKTPYDSILFQKNIEDSEIAYYYNPGDDEIQEIDKYRIPSIISDRPKIKLTFIGHGKDEFNTDIFAGLDVDSLSTEIETVIDLAKEDISPKAIEINLLGCNMFSYSINIEETYPGKLLLKVKDKISELMPSISQDSIIVSANQYEVRINSEGRRELLDHSGEWINKEESIIKDISSKEYISFNSKENKIIVKSKNLPELSTLLQEIRNNSNSSDIELEEKVMLAECEINVISNIDTQIVEERIEEAKNLTSDSINYIKNEFKLIESISDALCDLKQQNELEDSHFISFEDISETDEGFSIRFINKETGESIFVETEKTIFSEYANHITEEISKVKDTIFDTVNGKLVKKVNLDTTHEVNTLNAAFFIQSLIEYNSSKESLSNLSVAMKVQVYAQLFSTGLNTITDAAKVVELVSTALDETIDLLPTLSEGLPVIATIIDGVSLGSAIKELSETSDPLLRQEIEAKIGIMAVNLTAATTAIITSALGIASGFSILLVPLAGISAGIPSLVNNELILRDKATKVVDYFKHISLAETEGAFTLLDDKIIMPQDDLVISEIDFNNNSITLGKCEIWRMEGGSGHTVTDDIDHFFSSPSITYREPYLSIYDVLEVQKEELDLSKDLMVLPNAPNRVFAWETGWTPGLRSLENDGTKLLDRIRNHYEGEFYWRYFAFIADALITTLKPRYEDTNIRINLDSNTRSFVVPVITTEYIRENLSYSFYGSGGTYALSLSQYNMGINIELSESDVWIIDVDNVVRDVTIESDKIKKGDLIEGILSTLSIEDNKIILNSHELNFSGDVNGSNGFVSLTFSILEGINAIIEVDLLSKSYKLLLSGELKTLMSNSNYIQQKIDYIGFNSELQKNIPYSFVDAEGKKNGFINVSTKEGLFASELSDVVLISKVYMDNSKPSFGHYSDILKDVKVITKDDINILTGYYLKDDIKISLSFTLQDEHTIKLNGVHLDEKGVAEILTFMNKKVGTNTSDSLMSFLKSMNINNVFSHSLQDKVNLVLETNFIISGMTSIGQFEFICDENDNIQPYFIKFNALDTKYTLYLGNRQNMIVEPNYDLDDSGNISSTVINFSQKHLYGIDSFINKVIISPNLYTDEINITPVHETNNTYPEVIVLDANYISEKIKVNINDLSIRYIWSNDGNDFILMSTIGEDKASQVKIRFANVFKGNTLANKLSFNFSDKQDVSLSEIISAFTPSKYEDGFSSYKLGLISFYNEKFYINNFGMKVSGLIYINDSLYYFKPPVNNLITGFTTVGDDKYYFNPTNGGAASIGDTIIDDKNYYFNQIGVLQTGVFSTEDGFKYFAPANTLDENLEGEAIDFTGKLIIDENIYYFEDNYRGAVEWKELDGEMYYFSPETGKAFKGLNQIGDDKYYFNSDGIMQKGFVSINDKKHYFDDSGVMKVGYTEIDGKYFYFAENGEMQIGVFNTSDGFKYFAHYNEDLGNEEGEALSYSGILNFNNKIYYFDDSFTAVVGWRNLDDGSKYYFDENTAEAFIGFSLINDEQYYFNEDGIMQVGFVTINDRVFYFSDSGIIESGVQNIDDNYFYIDEKGIVQIGVFDTSDGYKYFAPPNTVNENIYGQAVEYSGLVKVNEDVYYFGETYLIETGWIYDMENESDKYYFDPETKKAYKGINVINDTKYYFDENGIMRTGLISFENNHYYFNEDGVMQSGYINIEDKMFYFSEDGIMQIGVFNTPDGFKYFAHQNTLDDNFEGESINYTGWLDFNEKRYYFTDEYIAATGSVTIDDEEYYFDPDTAELVLSE

SEQ ID NO: 827 - protein, 2367 aa, Clostridium difficile
MSLVNRKQLEKMANVRFRTQEDEYVAILDALEEYHNMSENTVVEKYLKLKDINSLTDIYIDTYKKSGRNKALKKFKEYLVTEVLELKNNNLTPVEKNLHFVWIGGQINDTAINYINQWKDVNSDYNVNVFYDSNAFLINTLKKTIVESATNDTLESFRENLNDPEFNHTAFFRKRMQIIYDKQQNFINYYKAQKEENPDLIIDDTVKSYLSDEYSKDIDELNAYIEESLNKIAENSGNDVRNFEEFKDGEVFNLYEQELVERWNLAAASDILRVAILKNIGGVYLDVDMLPGIHPDLFKNINKPDSVKTAVDWEEMQLEAIMKYKEYIPEYTSKHFDTLDEEVQSSFESVLASKSDKSEIFLPLGDIEVSPLEVKIAFAKGSIINQALISVKDSYCSDLLIKQIQNRYKILNDTLGPIISQGNDFNTTMNSFGESLGAISSEDNISFIAKIGSYLRVGFYPEANTTITLSGPTVYAGAYKDLLTFKEISLDTSILTSELRNFEFPKDNISQATEQEKNSLWQFNEERAKIQFEEYKRAYFEGALGEDDNLDFSQNIVTDKEYLLEKISSSTKSSERGYVHYIVQLQGDKISYEAACNLFAKNPYDSILFQKNIEDSEIAYYYNPADGEIQEIDKYRIPDRISDRPKIKLTFIGHGKDEFNTDIFAGLDVDSLSTEIETAIDLAKEDISSKSIEINLLGCNMFSYSINVEETYPGKLLLKVKDKISELMPSISQDSIIVSANQYEVRINSEGRRELLDHSGEWINKEESIIKDISSKEYISFNPKENKITVKSKNLPELSILLQEIRNNSNLSDIELEEKVMLAECEINVISNIDTQIVEERIEEAKNLTSDSINYIKNEFKLIESISDSLYDLKQQNELDDSHFISFEDISKTEDGFSIRFINKETGESIFVETEKEIFSEYANHIEREISNIKDTIFDTVNGKLVKKVNLDAIHEVNTLNAAFFIQSLIGYSSSKESLSNLSVAMKVQVYAQLFSTGLNTITDAAKVVELVSTALDETIDLLPTLSEGLPVIATIIDGVSLGAAIKELSETSDPLLRQEIEAKIGIMAVNLTAATTAIITSSLGIASGFSILLVPLAGISAGIPSLVNNELVLRDKATKVVDYFKHISLVETEGAFTLLDDKIMIPQDDLVISEIDFNNNSIVLGKCEIWRMEGGSGHTVTNDIDHFFSSPTITYIKPHLSIYDVLEVQKEELDLSKDLMVLPNAPNRVFAWETGWTPGLRSLENEGTKLLDRIRDHYKGEFYWRYFAFIADALITTLKPRYEDTNIRINLDSNNRSFIVPIITTEHIREKLSYSFHGSGGTYALSLSQYNMGINIELSESDVWIIDVDNVVRDVTIDSDKIKKGDLIEGILSTLSIEDNKIILNHHEINFSGDVNGSNGFISLTFSILEGINAIIEVDLLSKSYKLLISGELKILMLNSNHIQQKIDYIGFNSELQKNIPYSFVDSEGKENGFINGSTKEGLFVSELPDVVLISKVYMDDSKPSFGYYSNNLKDVKVITKDNVNILTGYYLKDDIKISLSFTLQDEKTIKLNGVHLDESGVAEILKFMNKKGSTNTSDSLMSFLESVNIKSIFVNFLQSKINFILDANFIISGTTSIGQFEFICDENDNIQPYFIKFNTLETTYTLYVGNRQNMIVEPNYDLDDSGDISSTVINFSQKYLYGIDSCVNKVVISPNIYTDEINITPVYETNNNYPEVIVLDANYINEKINVNINDLSIRYVWSNDGNDFILMSTSEENKVSQVKIRFVNVFKDKTLANKLSFNFSDKQDVPVSEIISAFTPSYYEDGLIGYDLGLVSLYNEKFYINNFGMMVSGLIYINDSLYYFKPPVNNLITGFVTVGDDKYYFNPTNGGAASIGETIIDDKNYYFNQSGILQTGVFSTEDGLKYFAPANTLDENLEGEAIDFTGKLIIDENIYYFEDNYRGAVEWKELDGEMYYFSPETGKAFKGLNQIGDDKYYFNSDGIMQKGFVSINDKKYYFDDSGVMKVGYIEIDGKYFYFAENGEMQIGVFNTSDGFKYFAHHNEDLGNEEGEAISYSGILNFNNKIYYFDYSFTAVVGWKDLEDGSKYYFDEDTAEAYVGLSLINDGQYYFNDDGIMQVGFVTINNKVFYFSDSGIIESGVQNIDDNYFYIDEKGIVQIGVFDTSDGYKYFAPANTVNDNIYGQAVDYSGLVRVGEDIYYFGETYTIETGWIYDMENESDKYYFNPETKKACKGINLIDDIKYYFDENGIMRTGLISFENNDYYFNENGEMHFGYINIEDKMFYFGEDGVMQIGVFNTPDGFKYFAHQNTLDENFEGESINYTGWLDLEGKRYYFTDEYIAATGTVTIDGEEYYFDPDTAELVVSE

SEQ ID NO: 828 - protein, 2367 aa, Clostridium difficile
MSLVNRKQLEKMANVRFRVQEDEYVAILDALEEYHNMSENTVVEKYLKLKDINSLTDTYIDTYKKSGRNKALKKFKEYLVTEILELKNSNLTPVEKNLHFIWIGGQINDTAINYINQWKDVNSDYNVNVFYDSNAFLINTLKKTIIESASNDTLESFRENLNDPEFNHTAFFRKRMQIIYDKQQNFINYYKVQKEENPDLIIDDIVKTYLSNEYSKDIDELNAYIEESLNKVTENSGNDVRNFEEFKTGEVFNLYEQELVERWNLAGASDILRVAILKNIGGVYLDVDMLPGIHPDLFKDINKPDSVKTAVDWEEMQLEAIMKYKEYIPEYTSKHFDTLDEEVQSSFESVLASKSDKSEIFLPLGDIEVSPLEVKIAFAKGSIINQALISAKDSYCSDLLIKQIQNRYKILNDTLGPIISQGNDFNTTMNNFGESLGAIANEENISFIAKIGSYLRVGFYPEANTTITLSGPTIYAGAYKDLLTFKEMSIDTSILSSELRNFEFPKVNISQATEQEKNSLWQFNEERAKIQFEEYKKNYFEGALGEDDNLDFSQNTVTDKEYLLEKISSSTKSSERGYVHYIVQLQGDKISYEAACNLFAKTPYDSVLFQKNIEDSEIAYYYNPGDGEIQEIDKYKIPSIISDRPKIKLTFIGHGKDEFNTDIFAGLDVDSLSTEIETAIGLAKEDISPKSIEINLLGCNMFSYSVNVEETYPGKLLLRVKDKVSELMPSISQDSIIVSANQYEVRINSEGRRELLDHSGEWINKEESIIKDISSKEYISFNPKENKIIVKSKNLPELSTLLQEIRNNSNSSDIELEEKVMLAECEINVISNIDTQVVEERIEEAKSLTSDSINYIKNEFKLIESISDALYDLKQQNELEESHFISFEDISETDEGFSIRFIDKETGESIFVETEKAIFSEYANHITEEISKLKDTIFDTVNGKLVKKVNLDATHEVNTLNAAFFIQSLIEYNSSKESLSNLSVAMKVQVYAQLFSTGLNTITDAAKVVELVSTALDETIDLLPTLSEGLPVIATIIDGVSLGAAIKELSETSDPLLRQEIEAKIGIMAVNLTAATTAIITSSLGIASGFSILLVPLAGISAGIPSLVNNELILRDKATKVVDYFSHISLAESEGAFTSLDDKIMMPQDDLVISEIDFNNNSITLGKCEIWRMEGGSGHTVTNDIDHFFSSPSITYREPHLSIYDVLEVKKEELDLSKDLMVLPNAPNRVFGWETGWTPGLRSLENDGTKLLDRIRDQYEGQFYWRFLAFIADALITTLKPRYEDTNVRISLDSNTRSFIVPVITTEYIREKLSYSFYGSGGTYALSLSQYNMNINIELNENDTWVIDVDNVVRDVTIESDKIKKGDLIENILSKLSIEDNKIILDNHEINFSGTLNGGNGFVSLTFSILEGINAVIEVDLLSKSYKVLISGELKTLMANSNSVQQKIDYIGLNSELQKNIPYSFMDDKGKENGFINCSTKEGLFVSELSDVVLISKVYMDNSKPLFGYCSNDLKDVKVITKDDVIILTGYYLKDDIKISLSFTIQDENTIKLNGVYLDENGVAEILKFMNKKGSTNTSDSLMSFLESMNIKSIFINSLQSNTKLILDTNFIISGATSIGQFEFICDKDNNIQPYFIKFNTLETKYTLYVGNRQNMIVEPNYDLDDSGDISSTVINFSQKYLYGIDSCVNKVIISPNIYTDEINITPVYEANNTYPEVIVLDTNYISEKINININDLSIRYVWSNDESDFILMSTDEENKVSQVKIRFTNVFKGNTISDKISFNFSDKQDVSINKIISTFTPSYYVEGLLNYDLGLISLYNEKFYINNFGMMVSGLVYINDSLYYFKPPIKNLITGFTTIGDDKYYFNPDNGGAASVGETIIDGKNYYFSQNGVLQTGVFSTEDGFKYFAPADTLDENLEGEAIDFTGKLTIDENVYYFGDNYRAAIEWQTLDDEVYYFSTDTGRAFKGLNQIGDDKFYFNSDGIMQKGFVNINDKTFYFDDSGVMKSGYTEIDGKYFYFAENGEMQIGVFNTADGFKYFAHHDEDLGNEEGEALSYSGILNFNNKIYYFDDSFTAVVGWKDLEDGSKYYFDEDTAEAYIGLSLINDGQYYFNDDGIMQVGFVAINDKVFYFSDSGIIESGVQNIDDNYFYIDEKGIVQIGVFDTSDGYKYFAPANTVNDNIYGQAVEYSGLVRVGEDVYYFGETYTIETGWIYDMENESDKYYFDPETKKACKGINTIHDIKYYFDETGIMRTGLITFENNHYYFNEDGEMQYGYLNIEDKMFYFSEDGIMQIGVFNTPDGFKYFAHQNTLDENFEGESINYTGWLDLDEKRYYFTDEYIAATGSVIIDGEEYYFDPDTAQLVISE

SEQ ID NO: 829 - protein, 2367 aa, Clostridium difficile
MSLVNRKQLEKMANVRFRVQEDEYVAILDALEEYHNMSENTVVEKYLKLKDINSLTDTYIDTYKKSGRNKALKKFKEYLVTEILELKNSNLTPVEKNLHFIWIGGQINDTAINYINQWKDVNSDYNVNVFYDSNAFLINTLKKTIIESASNDTLESFRENLNDPEFNHTAFFRKRMQIIYDKQQNFINYYKAQKEENPDLIIDDIVKTYLSNEYSKDIDELNAYIEESLNKVTENSGNDVRNFEEFKTGEVFNLYEQELVERWNLAGASDILRVAILKNIGGVYLDVDMLPGIHPDLFKDINKPDSVKTAVDWEEMQLEAIMKYKEYIPEYTSKHFDTLDEEVQSSFESVLASKSDKSEIFLPLGDIEVSPLEVKVAFAKGSIINQALISAKDSYCSDLLIKQIQNRYKILNDTLGPIISQGNDFNTTMNNFGESLGAIANEENISFIAKIGSYLRVGFYPEANTTITLSGPTIYAGAYKDLLTFKEMSIDTSILSSELRNFEFPKVNISQATEQEKNSLWQFNEERAKIQFEEYKKNYFEGALGEDDNLDFSQNTVTDKEYLLEKISSSTKSSERGYVHYIVQLQGDKISYEAACNLFAKNPYDSILFQKNIEDSEVAYYYNPTDSEIQEIDKYRIPDRISDRPKIKLTLIGHGKAEFNTDIFAGLDVDSLSSEIETIIDLAKADISPKSIEINLLGCNMFSYSVNVEETYPGKLLLRVKDKVSELMPSISQDSIIVSANQYEVRINSEGRRELLDHSGEWINKEESIIKDISSKEYISFNPKENKIIVKSKNLPELSTLLQEIRNNSNSSDIELEEKVMLAECEINVISNIETQVVEERIEEAKSLTSDSINYIKNEFKLIESISDALYDLKQQNELEESHFISFEDISKTDEGFSIRFIDKETGESIFVETEKAIFSEYANHITEEISKLKDTIFDTVNGKLVKKVTLDATHEVNTLNAAFFIQSLIGYNSSKESLSNLSVAMKVQVYAQLFSTGLNTITDAAKVVELVSTALDETIDLLPTLSEGLPVIATIIDGVSLGASIKELSETSDPLLRQEIEAKIGIMAVNLTAATTAIITSSLGIASGFSILLVPLAGISAGIPSLVNNELILRAEAKNVVDYFGHISLAESEGAFTLLDDKIMMPQDDLVISEIDFNNNSITLGKCEIWRMEGGSGHTVTDDIDHFFSAPSTTYREPYLSIYDVLDVKKEELDLSKDLMVLPNAPDRIFGWERGWTPGLRSLENDGTKLLDRIRDHYEGQFYWRFFAFIADSVITKLKPRYEDTNIRISLDSNTRSFIVPVITTEYIREKLSYSFYGSGGTYALSLSQYNMNINIELNENDTWVIDVDNVVRDVTIESDKIKKGDLIENILSKLSIEDNKIILDNHEINFSGTLNGGNGFVSLTFSILEGINAVIEVDLLSKSYKVLISGELKTLMANSNSVQQKIDYIGLNSELQKNIPYSFMDDEGKENGFINCFTKEGLFVSELSDVVLIIKVYMDNSKPPFGYYSNDLKDVKVITKDDVIILTGYYLKDDIKISLSFTIQDKNTIKLNGVYLDENGVAEILKFMNKKGSTNTSDSLMSFLESMNIKSIFIKSLKSNAKLILDTNFIISGTTSIGQFEFICDKDNNIQPYFIKFNTLETKYTLYVGNRQNMIVEPNYNLDDSGDISSTVINFSQKYLYGIDSCVNKVIISPNIYTDEINITPVHEANNTYPEVIVLDTNYISEKINININDLSIRYVWSNDGSDFILMSTDEENKVSQVKIRFTNVFKGNTISDKISFNFSDKQDISINKIISTFTPSYYVEGLLNYDLGLISLYNEKFYINNLGMMVSGLVYINDSLYYFKPPIKNLITGFTTIGDDKYYFNPDNGGAASVGETIIDGKNYYFSQNGVLQTGVFSTEDGFKYFAPADTLDENLEGEAIDFTGKLIIDENVYYFGDNYRAAIEWQTLDDEVYYFSTDTGRAFKGLNQIGDDKFYFNSDGIMQKGFVNINDKTFYFDDSGVMKSGYTEIDGKYFYFAENGEMQIGVFNTADGFKYFAHHDEDLGNEEGEALSYSGILNFNNKIYYFDDSFTAVVGWKDLEDGSKYYFDENTAEASIGISIINDGKYYFNDSGIMQIGFVTINNEVFYFSDSGIVESGMQNIDDNYFYISENGLVQIGVFDTSDGYKYFAPANTVNDNIYGQAVEYSGLVRVNEDVYSFGESYTIETGWIYDSENESDKYYFDPETKKAYKGINVIDDIKYYFDENGIMRTGLITFEDNHYYFNEDGEMQYGYLNIEDKMFYFSEDGIMQIGVFNTPDGFKYFAHQNTLDENFEGESINYTGWLDLDEKRYYFTDEYIAATGSVIIDGEEYYFDPDTAQLVISE

SEQ ID NO: 830 - protein, 2367 aa, Clostridium difficile
MSLVNRKQLEKMANVRFRVQEDEYVAILDALEEYHNMSENTVVEKYLKLKDINSLTDTYIDTYKKSGRNKALKKFKEYLVTEILELKNSNLTPVEKNLHFIWIGGQINDTAINYINQWKDVNSDYNVNVFYDSNAFLINTLKKTIIESASNDTLESFRENLNDPEFNHTAFFRKRMQIIYDKQQNFINYYKVQKEENPDLIIDDIVKTYLSNEYSKDIDELNAYIEESLNKVTENSGNDVRDFEEFKTGEVFNLYEQELVERWNLAGASDILRVAILKNIGGVYLDVDMLPGIHPDLFKDINKPDSVKTAVDWEEMQLEAIMKYKEYIPEYTSKHFDTLDEEVQSSFESVLASKSDKSEIFLPLGDIEVSPLEVKIAFAKGSIINQALISAKDSYCSDLLIKQIQNRYKILNDTLGPIISQGNDFNTTMNNFGESLGAIANEENISFIAKIGSYLRVGFYPEANTTITLSGPTIYAGAYKDLLTFKEMSIDTSILSSELRNFEFPKVNISQATEQEKNSLWQFNEERAKIQFEEYKKNYFEGALGEDDNLDFSQNTVTDKEYLLEKISSSTKSSERGYVHYIVQLQGDKISYEAACNLFAKNPYDSILFQKNIEDSEVAYYYNPTDSEIQEIDKYRIPDRISDRPKIKLTLIGHGKAEFNTDIFAGLDVDSLSSEIETIIDLAKADISPKSIEINLLGCNMFSYSVNVEETYPGKLLLRVKDKISELMPSISQDSIIVSANQYEVRINSEGRRELLDHSGEWINKEESIIKDISSKEYISFNPKENKIIVKSKNLPELSTLLQEIRNNSNSSDIELEEKVMLAECEINVISNIDTQVVEERIEEAKSLTSDSINYIKNEFKLIESISDALYDLKQQNELEESHFISFEDISETDEGFSIRFIDKETGESIFVETEKAIFSEYANHITEEISKLKDTIFDTVNGKLVKKVNLDATHEVNTLNAAFFIQSLIEYNSSKESLSNLSVAMKVQVYAQLFSTGLNTITDAAKVVELVSTALDETIDLLPTLSEGLPVIATIIDGVSLGAAIKELSETSDPLLRQEIEAKIGIMAVNLTAATTAIITSSLGIASGFSILLVPLAGISAGIPSLVNNELILRDKATKVVDYFSHISLAESEGAFTSLDDKIMMPQDDLVISEIDFNNNSITLGKCEIWRMEGGSGHTVTNDIDHFFSSPSITYREPHLSIYDVLEVKKEELDLSKDLMVLPNAPNRVFGWETGWTPGLRSLENDGTKLLDRIRDQYEGQFYWRFLAFIADALITTLKPRYEDTNVRINLDSNTRSFIVPIITTEYIREKLSYSFYGSGGTYALSLSQYNMNINIELNENDTWVIDVDNVVRDVTIESDKIKKGDLIENILSKLSIEDNKIILDNHEINFSGTLNGGNGFVSLTFSILEGINAVIEVDLLSKSYKVLISGELKTLMANSNSVQQKIDYIGLNSELQKNIPYSFMDDKGKENGFINCSTKEGLFVSELSDVVLISKVYMDNSKPLFGYCSNDLKDVKVITKDDVIILTGYYLKDDIKISLSFTIQDENTIKLNGVYLDENGVAEILKFMNKKGSTNTSDSLMSFLESMNIKSIFINSLQSNTKLILDTNFIISGTTSIGQFEFICDKDNNIQPYFIKFNTLETKYTLYVGNRQNMIVEPNYDLDDSGDISSTVINFSQKYLYGIDSCVNKVIISPNIYTDEINITPIYEANNTYPEVIVLDTNYISEKINININDLSIRYVWSNDGSDFILMSTDEENKVSQVKIRFTNVFKGNTISDKISFNFSDKQDVSINKIISTFTPSYYVEALLNYDLGLISLYNEKFYINNFGMMVSGLVYINDSLYYFKPPIKNLITGFTTIGDDKYYFNPDNGGAASVGETIIDGKNYYFSQNGVLQTGVFSTEDGFKYFAPADTLDENLEGEAIDFTGKLTIDENVYYFGDNYRAAIEWQTLDDEVYYFSTDTGRAFKGLNQIGDDKFYFNSDGIMQKGFVNINDKTFYFDDSGVMKSGYTEIDGKYFYFAENGEMQIGVFNTADGFKYFAHHDEDLGNEEGEALSYSGILNFNNKIYYFDDSFTAVVGWKDLEDGSKYYFDEDTAEAYIGLSLINDGQYYFNDDGIMQVGFVAINDKVFYFSDSGIIESGVQNIDDNYFYIDEKGIVQIGVFDTSDGYKYFAPANTVNDNIYGQAVEYSGLVRVGEDVYYFGETYTIETGWIYDMENESDKYYFDPETKKACKGINTIHDIKYYFDETGIMRTGLITFENNHYYFNEDGEMQYGYLNIEDKMFYFSEDGIMQIGVFNTPDGFKYFAHQNTLDENFEGESINYTGWLDLDEKRYYFTDEYIAATGSVIIDGEEYYFDPDTAQLVISE

SEQ ID NO: 831 - protein, 2367 aa, Clostridium difficile
MSLVNRKQLEKMANVRFRVQEDEYVAILDALEEYHNMSENTVVEKYLKLKDINSLTDTYIDTYKKSGRNKALKKFKEYLVTEILELKNSNLTPVEKNLHFIWIGGQINDTAINYINQWKDVNSDYNVNVFYDSNAFLINTLKKTIIESASNDTLESFRENLNDPEFNHTAFFRKRMQIIYDKQQNFINYYKVQKEENPDLIIDDIVKTYLSNEYSKDIDELNAYIEESLNKVTENSGNDVRNFEEFKTGEVFNLYEQELVERWNLAGASDILRVAILKNIGGVYLDVDMLPGIHPDLFKDINKPDSVKTAVDWEEMQLEAIMKYKEYIPEYTSKHFDTLDEEVQSSFESVLASKSDKSEIFLPLGDIEVSPLEVKIAFAKGSIINQALISAKDSYCSDLLIKQIQNRYKILNDTLGPIISQGNDFNTTMNNFGESLGAIANEENISFIAKIGSYLRVGFYPEANTTITLSGPTIYAGAYKDLLTFKEMSIDTSILSSELRNFEFPKVNISQATEQEKNSLWQFNEERAKIQFEEYKKNYFEGALGEDDNLDFSQNTVTDKEYLLEKISSSTKSSERGYVHYIVQLQGDKISYEAACNLFAKNPYDSILFQKNIEDSEVAYYYNPTDSEIQEIDKYRIPDRISDRPKIKLTLIGHGKAEFNTDIFAGLDVDSLSSEIETIIDLAKADISPKSIEINLLGCNMFSYSVNVEETYPGKLLLRVKDKISELMPSISQDSIIVSANQYEVRINSEGRRELLDHSGEWINKEESIIKDISSKEYISFNPKENKIIVKSKNLPELSTLLQEIRNNSNSSDIELEEKVMLAECEINVISNIDTQVVEERIEEAKSLTSDSINYIKNEFKLIESISDALYDLKQQNELEESHFISFEDISETDEGFSIRFIDKETGESIFVETEKAIFSEYANHITEEISKLKDTIFDTVNGKLVKKVNLDATHEVNTLNAAFFIQSLIEYNSSKESLSNLSVAMKVQVYAQLFSTGLNTITDAAKVVELVSTALDETIDLLPTLSEGLPVIATIIDGVSLGAAIKELSETSDPLLRQEIEAKIGIMAVNLTAATTAIITSSLGIASGFSILLVPLAGISAGIPSLVNNELILRDKATKVVDYFSHISLAESEGAFTSLDDKIMMPQDDLVISEIDFNNNSITLGKCEIWRMEGGSGHTVTNDIDHFFSSPSITYREPHLSIYDVLEVKKEELDLSKDLMVLPNAPNRVFGWETGWTPGLRSLENDGTKLLDRIRDQYEGQFYWRFLAFIADALITTLKPRYEDTNVRINLDSNTRSFIVPIITTEYIREKLSYSFYGSGGTYALSLSQYNMNINIELNENDTWVIDVDNVVRDVTIESDKIKKGDLIENILSKLSIEDNKIILDNHEINFSGTLNGGNGFVSLTFSILEGINAVIEVDLLSKSYKVLISGELKTLMANSNSVQQKIDYIGLNSELQKNIPYSFMDDKGKENGFINCSTKEGLFVSELSDVVLISKVYMDDSKPSFGYYSNNLKDVKVITKDNVNILTGYYLKDDIKISLSLTLQDEKTIKLNSVHLDESGVAEILKFMNRKGSTNTSDSLMSFLESMNIKSIFVNFLQSNIKFILDANFIISGTTSIGQFEFICDKDNNIQPYFIKFNTLETKYTLYVGNRQNMIVEPNYDLDDSGDISSTVINFSQKYLYGIDSCVNKVIISPNIYTDEINITPIYEANNTYPEVIVLDTNYISEKINININDLSIRYVWSNDGSDFILMSTDEENKVSQVKIRFTNVFKGNTISDKISFNFSDKQDVSINKIISTFTPSYYVEGLLNYDLGLISLYNEKFYINNFGMMVSGLVYINDSLYYFKPPIKNLITGFTTIGDDKYYFNPDNGGAASVGETIIDGKNYYFSQNGVLQTGVFSTEDGFKYFAPADTLDENLEGEAIDFTGKLTIDENVYYFGDNYRAAIEWQTLDDEVYYFSTDTGRAFKGLNQIGDDKFYFNSDGIMQKGFVNINDKTFYFDDSGVMKSGYTEIDGKYFYFAENGEMQIGVFNTADGFKYFAHHDEDLGNEEGEALSYSGILNFNNKIYYFDDSFTAVVGWKDLEDGSKYYFDEDTAEAYIGISIINDGKYYFNDSGIMQIGFVTINNEVFYFSDSGIVESGMQNIDDNYFYIDENGLVQIGVFDTSDGYKYFAPANTVNDNIYGQAVEYSGLVRVGEDVYYFGETYTIETGWIYDMENESDKYYFDPETKKAYKGINVIDDIKYYFDENGIMRTGLITFEDNHYYFNEDGIMQYGYLNIEDKTFYFSEDGIMQIGVFNTPDGFKYFAHQNTLDENFEGESINYTGWLDLDEKRYYFTDEYIAATGSVIIDGEEYYFDPDTAQLVISE

SEQ ID NO: 832 - protein, 2367 aa, Clostridium difficile
MSLVNRKQLEKMANVRFRTQEDEYVAILDALEEYHNMSENTVVEKYLKLKDINSLTDIYIDTYKKSGRNKALKKFKEYLVTEVLELKNNNLTPVEKNLHFVWIGGQINDTAINYINQWKDVNSDYNVNVFYDSNAFLINTLKKTIVESATNDTLESFRENLNDPEFNHTAFFRKRMQIIYDKQQNFINYYKAQKEENPDLIIDDTVKSYLSDEYSKDIDELNAYIEESLNKIAENSGNDVRNFEEFKDGEVFNLYEQELVERWNLAAASDILRVAILKNIGGVYLDVDMLPGIHPDLFKNINKPDSVKTAVDWEEMKLEAIMKYKEYIPEYTSKHFDTLDEEVQSSFESVLASKSDKSEIFLPLGDIEVSPLEVKIAFAKGSIINQALISVKDSYCSDLLIKQIQNRYKILNDTLGPIISQGNDFNTTMNSFGESLGAISSEDNISFIAKIGSYLRVGFYPEANTTITLSGPTVYAGAYKDLLTFKEISLDTSILTSELRNFEFPKDNISQATEQEKNSLWQFNEERAKIQFEEYKRAYFEGALGEDDNLDFSQNTVTDKEYLLEKISSSTKSSERGYVHYIVQLQGDKISYEAACNLFAKNPYDSILFQKNIEDSEIAYYYNPADGEIQEIDKYRIPDRISDRPKIKLTFIGHGKDEFNTDIFAGLDVDSLSTEIETAIDLAKEDISSKSIEINLLGCNMFSYSINVEETYPGKLLLKVKDKISELMPSISQDSIIVSANQYEVRINSEGRRELLDHSGEWINKEESIIKDISSKEYISFNPKENKITVKSKNLPELSTLLQEIRNNSNLSDIELEEKVMLAECEINVISNIDTQIVEERIEEAKNLTSDSINYIKNEFKLIESISDSLYDLKQQNELDDSHFISFEDISKTEDGFSIRFINKETGESIFVETEKEIFSEYANHIEREISNIKDTIFDTVNGKLVKKVNLDAIHEVNTLNAAFFIQSLIGYSSSKESLSNLSVAMKVQVYAQLFSTGLNTITDAAKVVELVSTALDETIDLLPTLSEGLPVIATIIDGVSLGAAIKELSETSDPLLRQEIEAKIGIMAVNLTAATTAIITSSLGIASGFSILLVPLAGISAGIPSLVNNELVLRDKATKVVDYFKHISLVETEGAFTLLDDKIMIPQDDLVISEIDFNNNSIVLGKCEIWRMEGGSGHTVTNDIDHFFSSPTITYIKPHLSIYDVLEVQKEELDLSKDLMVLPNAPNRVFAWETGWTPGLRSLENEGTKLLDRIRDHYKGEFYWRYFAFIADALITTLKPRYEDTNIRINLDSNNRSFIVPIITTEHIREKLSYSFHGSGGTYALSLSQYNMGINIELSESDVWIIDVDNVVRDVTIDSDKIKKGDLIEGILSTLSIEDNKIILNHHEINFSGDVNGSNGFISLTFSILEGINAIIEVDLLSKSYKLLISGELKILMLNSNHIQQKIDYIGFNSELQKNIPYSFVDSEGKENGFINGSTKEGLFVSELPDVVLISKVYMDDSKPSFGYYSNNLKDVKVITKDNVNILTGYYLKDDIKISLSFTLQDEKTIKLNGVHLDESGVAEILKFMNKKGSTNTSDSLMSFLESVNIKSIFVNFLQSKINFILDANFIISGTTSIGQFEFICDENDNIQPYFIKFNTLETTYTLYVGNRQNMIVEPNYDLDDSGDISSTVINFSQKYLYGIDSCVNKVVISPNIYTDEINITPVYETNNNYPEVIVLDANYINEKINVNINDLSIRYVWSNDGNDFILMSTSEENKVSQVKIRFVNVFKDKTLANKLSFNFSDKQDVPVSEIISAFTPSYYEDGLIGYDLGLVSLYNEKFYINNFGMMVSGLIYINDSLYYFKPPVNNLITGFVTVGDDKYYFNPTNGGAASIGETIIDDKNYYFNQSGILQTGVFSTEDGLKYFAPANTLDENLEGEAIDFTGKLIIDENIYYFEDNYRGAVEWKELDGEMYYFSPETGKAFKGLNQIGDDKYYFNSDGIMKKGFVSINDKKYYFDDSGVMKVGYIEIDGKYFYFAENGEMQIGVFNTSDGFKYFAHHNEDLGNEEGEAISYSGILNFNNKIYYFDYSFTAVVGWKDLEDGSKYYFDEDTAEAYVGLSLINDGQYYFNDDGIMQVGFVTINNKVFYFSDSGIIESGVQNIDDNYFYIDEKGIVQIGVFDTSDGYKYFAPANTVNDNIYGQAVDYSGLVRVGEDIYYFGETYTIETGWIYDMENESDKYYFNPETKKACKGINLIDDIKYYFDENGIMRTGLISFENNDYYFNENGEMHFGYINIEDKMFYFGEDGVMQIGVFNTPDGFKYFAHQNTLDENFEGESINYTGWLDLEGKRYYFTDEYIAATGTVTIDGEEYYFDPDTAELVVSE

SEQ ID NO: 833 - protein, 2366 aa, Clostridium difficile
MSLVNRKQLEKMANVRFRTQEDEYVAILDALEEYHNMSENTVVEKYLKLKDINSLTDIYIDTYKKSGRNKALKKFKEYLVTEVLELKNNNLTPVEKNLHFVWIGGQINDTAINYINQWKDVNSDYNVNVFYDSNAFLINTLKKTVVESAINDTLESFRENLNDPRFDYNKFFRKRMEIIYDKQKNFINYYKAQREENPELIIDDIVKTYLSNEYSKEIDELNTYIEESLNKITQNSGNDVRNFEEFKNGESFNLYEQELVERWNLAAASDILRISALKEIGGMYLDVDMLPGIQPDLFESIEKPSSVTVDFWEMTKLEAIMKYKEYIPEYTSEHFDMLDEEVQSSFESVLASKSDKSEIFSSLGDMEASPLEVKIAFNSKGIINQGLISVKDSYCSNLIVKQIENRYKILNNSLNPAISEDNDFNTTTNTFIDSIMAEANADNGRFMMELGKYLRVGFFPDVKTTINLSGPEAYAAAYQDLLMFKEGSMNIHLIEADLRNFEISKTNISQSTEQEMASLWSFDDARAKAQFEEYKRNYFEGSLGEDDNLDFSQNIVVDKEYLLEKISSLARSSERGYIHYIVQLQGDKISYEAACNLFAKTPYDSVLFQKNIEDSEIAYYYNPGDGEIQEIDKYKIPSIISDRPKIKLTFIGHGKDEFNTDIFAGFDVDSLSTEIEAAIDLAKEDISPKSIEINLLGCNMFSYSINVEETYPGKLLLKVKDKISELMPSISQDSIIVSANQYEVRINSEGRRELLDHSGEWINKEESIIKDISSKEYISFNPKENKITVKSKNLPELSTLLQEIRNNSNSSDIELEEKVMLTECEINVISNIDTQIVEERIEEAKNLTSDSINYIKDEFKLIESISDALCDLKQQNELEDSHFISFEDISETDEGFSIRFINKETGESIFVETEKTIFSEYANHITEEISKIKGTIFDTVNGKLVKKVNLDTTHEVNTLNAAFFIQSLIEYNSSKESLSNLSVAMKVQVYAQLFSTGLNTITDAAKVVELVSTALDETIDLLPTLSEGLPIIATIIDGVSLGAAIKELSETSDPLLRQEIEAKIGIMAVNLTTATTAIITSSLGIASGFSILLVPLAGISAGIPSLVNNELVLRDKATKVVDYFKHVSLVETEGVFTLLDDKIMMPQDDLVISEIDFNNNSIVLGKCEIWRMEGGSGHTVTDDIDHFFSAPSITYREPHLSIYDVLEVQKEELDLSKDLMVLPNAPNRVFAWETGWTPGLRSLENDGTKLLDRIRDNYEGEFYWRYFAFIADALITTLKPRYEDTNIRINLDSNTRSFIVPIITTEYIREKLSYSFYGSGGTYALSLSQYNMGINIELSESDVWIIDVDNVVRDVTIESDKIKKGDLIEGILSTLSIEENKIILNSHEINFSGEVNGSNGFVSLTFSILEGINAIIEVDLLSKSYKLLISGELKILMLNSNHIQQKIDYIGFNSELQKNIPYSFVDSEGKENGFINGSTKEGLFVSELPDVVLISKVYMDDSKPSFGYYSNNLKDVKVITKDNVNILTGYYLKDDIKISISLTLQDEKTIKLNSVHLDESGVAEILKFMNRKGNTNTSDSLMSFLESMNIKSIFVNFLQSNIKFILDANFIISGTTSIGQFEFICDENDNIQPYFIKFNTLETNYTLYVGNRQNMIVEPNYDLDDSGDISSTVINFSQKYLYGIDSCVNKVVISPNIYTDEINITPVYETNNTYPEVIVLDANYINEKINVNINDLSIRYVWSNDGNDFILMSTSEENKVSQVKIRFVNIFKDKTLANKLSFNFSDKQDVPVSEIILSFTPSYYEDGLIGYDLGLVSLYNEKFYINNFGMMVSGLIYINDSLYYFKPPVNNLITGFVTVGDDKYYFNPINGGAASIGETIIDDKNYYFNQSGVLQTGVFSTEDGFKYFAPANTLDENLEGEAIDFTGKLIIDENIYYFDDNYRGAVEWKELDGEMHYFSPETGKAFKGLNQIGDDKYYFNSDGVMQKGFVSINDNKHYFDDSGVMKVGYTEIDGKHFYFAENGEMQIGVFNTEDGFKYFAHHNEDLGNEEGEEISYSGILNFNNKIYYFDDSFTAVVGWKDLEDGSKYYFDEDTAEAYIGLSLINDGQYYFNDDGIMQVGFVTINDKVFYFSDSGIIESGVQNIDDNYFYIDDNGIVQIGVFDTSDGYKYFAPANTVNDNIYGQAVEYSGLVRVGEDVYYFGETYTIETGWIYDMENESDKYYFNPETKKACKGINLIDDIKYYFDEKGIMRTGLISFENNNYYFNENGEMQFGYINIEDKMFYFGEDGVMQIGVFNTPDGFKYFAHQNTLDENFEGESINYTGWLDLDEKRYYFTDEYIAATGSVIIDGEEYYFDPDTAQLVISE

SEQ ID NO: 834 - protein, 2366 aa, Clostridium difficile
MSLVNRKQLEKMANVRFRTQEDEYVAILDALEEYHNMSENTVVEKYLKLKDINSLTDIYIDTYKKSGRNKALKKFKEYLVTEVLELKNNNLTPVEKNLHFVWIGGQINDTAINYINQWKDVNSDYNVNVFYDSNAFLINTLKKTVVESAINDTLESFRENLNDPRFDYNKFFRKRMEIIYDKQKNFINYYKAQREENPELIIDDIVKTYLSNEYSKEIDELNTYIEESLNKITQNSGNDVRNFEEFKNGESFNLYEQELVERWNLAAASDILRISALKEIGGMYLDVDMLPGIQPDLFESIEKPSSVTVDFWEMTKLEAIMKYKEYIPEYTSEHFDMLDEEVQSSFESVLASKSDKSEIFSSLGDMEASPLEVKIAFNSKGIINQGLISVKDSYCSNLIVKQIENRYKILNNSLNPAISEDNDFNTTTNTFIDSIMAEANADNGRFMMELGKYLRVGFFPDVKTTINLSGPEAYAAAYQDLLMFKEGSMNIHLIEADLRNFEIFKTNISQSTEQEMASLWSFDDARAKAQFEEYKRNYFEGSLGEDDNLDFSQNIVVDKEYLLEKISSLARSSERGYIHYIVQLQGDKISYEAACNLFAKTPYDSVLFQKNIEDSEIAYYYNPGDGEIQEIDKYKIPSIISDRPKIKLTFIGHGKDEFNTDIFAGFDVDSLSTEIEAAIDLAKEDISPKSIEINLLGCNMFSYSINVEETYPGKLLLKVKDKISELMPSISQDSIIVSANQYEVRINSEGRRELLDHSGEWINKEESIIKDISSKEYISFNPKENKITVKSKNLPELSTLLQEIRNNSNSSDIELEEKVMLTECEINVISNIDTQIVEERIEEAKNLTSDSINYIKDEFKLIESISDALCDLKQQNELEDSHFISFEDISETDEGFSIRFINKETGESIFVETEKTIFSEYANHITEEISKIKGTIFDTVNGKLVKKVNLDTTHEVNTLNAAFFIQSLIEYNSSKESLSNLSVAMKVQVYAQLFSTGLNTITDAAKVVELVSTALDETIDLLPTLSEGLPIIATIIDGVSLGAAIKELSETSDPLLRQEIEAKIGIMAVNLTTATTAIITSSLGIASGFSILLVPLAGISAGIPSLVNNELVLRDKATKVVDYFKHVSLVETEGVFTLLDDKIMMPQDDLVISEIDFNNNSIVLGKCEIWRMEGGSGHTVTDDIDHFFSAPSITYREPHLSIYDVLEVQKEELDLSKDLMVLPNAPNRVFAWETGWTPGLRSLENDGTKLLDRIRDNYEGEFYWRYFAFIADALITTLKPRYEDTNIRINLDSNTRSFIVPIITTEYIREKLSYSFYGSGGTYALSLSQYNMGINIELSESDVWIIDVDNVVRDVTIESDKIKKGDLIEGILSTLSIEENKIILNSHEINFSGEVNGSNGFVSLTFSILEGINAIIEVDLLSKSYKLLISGELKILMLNSNHIQQKIDYIGFNSELQKNIPYSFVDSEGKENGFINGSTKEGLFVSELPDVVLISKVYMDDSKPSFGYYSNNLKDVKVITKDNVNILTGYYLKDDIKISLSLTLQDEKTIKLNSVHLDESGVAEILKFMNRKGNTNTSDSLMSFLESMNIKSIFVNFLQSNIKFILDANFIISGTTSIGQFEFICDENDNIQPYFIKFNTLETNYTLYVGNRQNMIVEPNYDLDDSGDISSTVINFSQKYLYGIDSCVNKVVISPNIYTDEINITPVYETNNTYPEVIVLDANYINEKINVNINDLSIRYVWSNDGNDFILMSTSEENKVSQVKIRFVNVFKDKTLANKLSFNFSDKQDVPVSEIILSFTPSYYEDGLIGYDLGLVSLYNEKFYINNFGMMVSGLIYINDSLYYFKPPVNNLITGFVTVGDDKYYFNPINGGAASIGETIIDDKNYYFNQSGVLQTGVFSTEDGFKYFAPANTLDENLEGEAIDFTGKLIIDENIYYFDDNYRGAVEWKELDGEMHYFSPETGKAFKGLNQIGDYKYYFNSDGVMQKGFVSINDNKHYFDDSGVMKVGYTEIDGKHFYFAENGEMQIGVFNTEDGFKYFAHHNEDLGNEEGEEISYSGILNFNNKIYYFDDSFTAVVGWKDLEDGSKYYFGEDTAEAYIGLSLINDGQYYFNDDGIMQVGFVTINDKVFYFSDSGIIESGVQNIDDNYFYIDDNGIVQIGVFDTSDGYKYFAPANTVNDNIYGQAVEYSGLVRVGEDVYYFGETYTIETGWIYDMENESDKYYFNPETKKACKGINLIDDIKYYFDEKGIMRTGLISFENNNYYFNENGEMQFGYINIEDKMFYFGEDGVMQIGVFNTPDGFKYFAHQNTLDENFEGESINYTGWLDLDEKRYYFTDEYIAATGSVIIDGEEYYFDPDTAQLVISE

SEQ ID NO: 835 - protein, 2367 aa, Clostridium difficile
MSLVNRKQLEKMANVRFRVQEDEYVAILDALEEYHNMSENTVVEKYLKLKDINSLTDTYIDTYKKSGRNKALKKFKEYLVTEILELKNSNLTPVEKNLHFIWIGGQINDTAINYINQWKDVNSDYNVNVFYDSNAFLINTLKKTIIESASNDTLESFRENLNDPEFNHTAFFRKRMQIIYDKQQNFINYYKAQKEENPDLIIDDIVKTYLSNEYSKDIDELNAYIEESLNKVTENSGNDVRNFEEFKTGEVFNLYEQELVERWNLAGASDILRVAILKNIGGVYLDVDMLPGIHPDLFKDINKPDSVKTAVDWEEMQLEAIMKYKEYIPEYTSKHFDTLDEEVQSNFESVLASKSDKSEIFLPLGDIEVSPLEVKVAFAKGSIINQALISAKDSYCSDLLIKQIQNRYKILNDTLGPIISQGNDFNTTMNNFGESLGAIANEENISFIAKIGSYLRVGFYPEANTTITLSGPTIYAGAYKDLLTFKEMSIDTSILSSELRNFEFPKVNISQATEQEKNSLWQFNEERAKIQFEEYKKNYFEGALGEDDNLDFSQNTVTDKEYLLEKISSSTKSSERGYVHYIVQLQGDKISYEAACNLFAKNPYDSILFQKNIEDSEVAYYYNPTDSEIQEIDKYRIPDRISDRPKIKLTLIGHGKAEFNTDIFAGLDVDSLSSEIETIIDLAKADISPKSIEINLLGCNMFSYSVNVEETYPGKLLLRVKDKVSELMPSISQDSIIVSANQYEVRINSEGRRELLDHSGEWINKEESIIKDISSKEYISFNPKENKIIVKSKNLPELSTLLQEIRNNSNSSDIELEEKVMLAECEINVISNIETQVVEERIEEAKSLTSDSINYIKNEFKLIESISDALYDLKQQNELEESHFISFEDISKTDEGFSIRFIDKETGESIFVETEKAIFSEYANHITEEISKLKDTIFDTVNGKLVKKVNLDATHEVNTLNAAFFIQSLIGYNSSKESLSNLSVAMKVQVYAQLFSTGLNTITDAAKVVELVSTALDETIDLLPTLSEGLPVIATIIDGVSLGASIKELSETSDPLLRQEIEAKIGIMAVNLTAATTAIITSSLGIASGFSILLVPLAGISAGIPSLVNNELILRAEAKNVVDYFGHISLAESEGAFTLLDDKIMMPQDDLVISEIDFNNNSITLGKCEIWRMEGGSGHTVTDDIDHFFSAPSTTYREPYLSIYDVLDVKKEELDLSKDLMVLPNAPDRIFGWERGWTPGLRSLENDGTKLLDRIRDHYEGQFYWRFFAFIADSVITKLKPRYEDTNIRISLDSNTRSFIVPVITTEYIREKLSYSFYGSGGTYALSLSQYNMNINIELNENDTWVIDVDNVVRDVTIESDKIKKGDLIENILSKLSIEDNKIILDNHEINFSGTLNGGNGFVSLTFSILEGINAVIEVDLLSKSYKVLISGELKTLMANSNSVQQKIDYIGLNSELQKNIPYSFMDDEGKENGFINCFTKEGLFVSELSDVVLIIKVYMDNSKPPFGYYSNDLKDVKVITKDDVIILTGYYLKDDIKISLSFTIQDKNTIKLNGVYLDENGVAEILKFMNKKGSTNTSDSLMSFLESMNIKSIFIKSLKSNAKLILDTNFIISGTTSIGQFEFICDKDNNIQPYFIKFNTLETKYTLYVGNRQNMIVEPNYNLDDSGDISSTVINFSQKYLYGIDSCVNKVIISPNIYTDEINITPVHEANNTYPEVIVLDTNYISEKINININDLSIRYVWSNDGSDFILMSTDEENKVSQVKIRFTNVFKGNTISDKISFNFSDKQDVSINKIISTFTPSYYVEGLLNYHLGLISLYNEKFYINNFGMMVSGLVYINDSLYYFKPPIKNLITGFTTIGDDKYYFNPDNGGAASVGETIIDGKNYYFSQNGVLQTGVFSTEDGFKYFAPADTLDENLEGEAIDFTGKLTIDENVYYFGDNYRAAIEWQTLDDEVYYFSTDTGRAFKGLNQIGDDKFYFNSDGIMQKGFVNINDKTFYFDDSGVMKSGYTEIDGKYFYFAENGEMQIGVFNTADGFKYFAHHDEELGNEEGEALSYSGILNFNNKIYYFDDSFTAVVGWKDLEDGSKYYFDEDTAEAYIGISIINDSKYYFNDSGIMQIGFVTINNEVFYFSDSGIVESGMQNIDDNYFYIDENGLVQIGVFDTSDGYKYFAPANTVNDNIYGQAVEYSGLVRVNEDVYSFGESYTIETGWIYDSENESDKYYFDPETKKAYKGINVIDDIKYYFDENGIMRTGLITFENNHYYFNEDGEMQYGYLNIEDKMFYFSEDGIMQIGVFNTPDGFKYFAHQNTLDENFEGESINYTGWLDLDEKRYYFTDEYIAATGSVIIDGEEYYFDPDTAELVISE

SEQ ID NO: 836 - protein, 2366 aa, Clostridium difficile
MSLVNRKQLEKMANVRFRTQEDEYVAILDALEEYHNMSENTVVEKYLKLKDINSLTDIYIDTYKKSGRNKALKKFKEYLVTEVLELKNNNLTPVEKNLHFVWIGGQINDTAINYINQWKDVNSDYNVNVFYDSNAFLINTLKKTVVESAINDTLESFRENLNDPRFDYNKFFRKRMEIIYDKQKNFINYYKAQREENPELIIDDIVKTYLSNEYSKEIDELNTYIEESLNKITQNSGNDVRNFEEFKNGESFNLYEQELVERWNLAAASDILRISALKEIGGMYLDVDMLPGIQPDLFESIEKPSSVTVDFWEMTKLEAIMKYKEYIPEYTSEHFDMLDEEVQSSFESVLASKSDKSEIFSSLGDMEASPLEVKIAFNSKGIINQGLISVKDSYCSNLIVKQIENRYKILNNSLNPAISEDNDFNTTTNTFIDSIMAEANADNGRFMMELGKYLRVGFFPDVKTTINLSGPEAYAAAYQDLLMFKEGSMNIHLIEADLRNFEISKTNISQSTEQEMASLWSFDDARAKAQFEEYKRNYFEGSLGEDDNLDFSQNIVVDKEYLLEKISSLARSSERGYIHYIVQLQGDKISYEAACNLFAKTPYDSVLFQKNIEDSEIAYYYNPGDGEIQEIDKYKIPSIISDRPKIKLTFIGHGKDEFNTDIFAGFDVDSLSTEIEAAIDLAKEDISPKSIEINLLGCNMFSYSINVEETYPGKLLLKVKDKVSELMPSISQDSIIVSANQYEVRINSEGRRELLDHSGEWINKEESIIKDISSKEYISFNPKENKITVKSKNLPELSTLLQEIRNNSNSSDIELEEKVMLTECEINVISNIDTQIVEERIEEAKNLTSDSINYIKDEFKLIESISDALCDLKQQNELEDSHFISFEDISETDEGFSIRFINKETGESIFVETEKTIFSEYANHITEEISKIKGTIFDTVNGKLVKKVNLDTTHEVNTLNAAFFIQSLIEYNSSKESLSNLSVAMKVQVYAQLFSTGLNTITDAAKVVELVSTALDETIDLLPTLSEGLPIIATIIDGVSLGAAIKELSETSDPLLRQEIEAKIGIMAVNLTTATTAIITSSLGIASGFSILLVPLAGISAGIPSLVNNELVLRDKATKVVDYFKHVSLVETEGVFTLLDDKIMMPQDDLVISEIDFNNNSIVLGKCEIWRMEGGSGHTVTDDIDHFFSAPSITYREPHLSIYDVLEVQKEELDLSKDLMVLPNAPNRVFAWETGWTPGLRSLENDGTKLLDRIRDNYEGEFYWRYFAFIADALITTLKPRYEDTNIRINLDSNTRSFIVPIITTEYIREKLSYSFYGSGGTYALSLSQYNMGINIELSESDVWIIDVDNVVRDVTIESDKIKKGDLIEGILSTLSIEENKIILNSHEINFSGEVNGSNGFVSLTFSILEGINAIIEVDLLSKSYKLLISGELKILMLNSNHIQQKIDYIGFNSELQKNIPYSFVDSEGKENGFINGSTKEGLFVSELPDVVLISKVYMDDSKPSFGYYSNNLKDVKVITKDNVNILTGYYLKDDIKISLSLTLQDEKTIKLNSVHLDESGVAEILKFMNRKGSTNTSDSLMSFLESMNIKSIFVNFLQSNIKFILDANFIISGTTSIGQFEFICDENDNIQPYFIKFNTLETNYTLYVGNRQNMIVEPNYDLDDSGDISSTVINFSQKYLYGIDSCVNKVVISPNIYTDEINITPVYETNNTYPEVIVLDANYINEKINVNINDLSIRYVWSNDGNDFILMSTSEENKVSQVKIRFVNVFKDKTLANKLSFNFSDKQDVPVSEIILSFTPSYYEDGLIGYDLGLVSLYNEKFYINNFGMMVSGLIYINDSLYYFKPPVNNLITGFVTVGDDKYYFNPINGGAASIGETIIDDKNYYFNQSGVLQTGVFSTEDGFKYFAPANTLDENLEGEAIDFTGKLIIDENIYYFDDNYRGAVEWKELDGEMHYFSPETGKAFKGLNQIGDDKYYFNSDGVMQKGFVSINDNKHYFDDSGVMKVGYTEIDGKHFYFAENGEMQIGVFNTEDGFKYFAHHNEDLGNEEGEEISYSGILNFNNKIYYFDDSFTAVVGWKDLEDGSKYYFDEDTAEAYIGLSLINDGQYYFNDDGIMQVGFVTINDKVFYFSDSGIIESGVQNIDDNYFYIDDNGIVQIGVFDTSDGYKYFAPANTVNDNIYGQAVEYSGLVRVGEDVYYFGETYTIETGWIYDMENESDKYYFNPETKKACKGINLIDDIKYYFDEKGIMRTGLISFENNNYYFNENGEMQFGYINIEDKMFYFGEDGVMQIGVFNTPDGFKYFAHQNTLDENFEGESINYTGWLDLDEKRYYFTDEYIAATGSVIIDGEEYYFDPDTAQLVISE

SEQ ID NO: 837 - protein, 2366 aa, Clostridium difficile
MSLVNRKQLEKMANVRFRTQEDEYVAILDALEEYHNMSENTVVEKYLKLKDINSLTDIYIDTYKKSGRNKALKKFKEYLVTEVLELKNNNLTPVEKNLHFVWIGGQINDTAINYINQWKDVNSDYNVNVFYDSNAFLINTLKKTVVESAINDTLESFRENLNDPRFDYNKFFRKRMEIIYNKQKNFINYYKAQREENPELIIDDIVKTYLSNEYSKEIDELNTYIEESLNKITQNSGNDVRNFEEFKNGESFNLYEQELVERWNLAAASDILRISALKEIGGMYLDVDMLPGIQPDLFESIEKPSSVTVDFWEMTKLEAIMKYKEYIPEYTSEHFDMLDEEVQSSFESVLASKSDKSEIFSSLGDMEASPLEVKIAFNSKGIINQGLISVKDSYCSNLIVKQIENRYKILNNSLNPAISEDNDFNTTTNTFIDSIMAEANADNGRFMMELGKYLRVGFFPDVKTTINLSGPEAYAAAYQDLLMFKEGSMNIHLIEADLRNFEISKTNISQSTEQEMASLWSFDDARAKAQFEEYKRNYFEGSLGEDDNLDFSQNIVVDKEYLLEKISSLARSSERGYIHYIVQLQGDKISYEAACNLFAKTPYDSVLFQKNIEDSEIAYYYNPGDGEIQEIDKYKIPSIISDRPKIKLTFIGHGKDEFNTDIFAGFDVDSLSTEIEAAIDLAKEDISPKSIEINLLGCNMFSYSINVEETYPGKLLLKVKDKISELMPSISQDSIIVSANQYEVRINSEGRRELLDHSGEWINKEESIIKDISSKEYISFNPKENKITVKSKNLPELSTLLQEIRNNSNSSDIELEEKVMLTECEINVISNIDTQIVEERIEEAKNLTSDSINYIKDEFKLIESISDALCDLKQQNELEDSHFISFEDISETDEGFSIRFINKETGESIFVETEKTIFSEYANHITEEISKIKGTIFDTVNGKLVKKVNLDTTHEVNTLNAAFFIQSLIEYNSSKESLSNLSVAMKVQVYAQLFSTGLNTITDAAKVVELVSTALDETIDLLPTLSEGLPIIATIIDGVSLGAAIKELSETSDPLLRQEIEAKIGIMAVNLTTATTAIITSSLGIASGFSILLVPLAGISAGIPSLVNNELVLRDKATKVVDYFKHVSLVETEGVFTLLDDKVMMPQDDLVISEIDFNNNSIVLGKCEIWRMEGGSGHTVTDDIDHFFSAPSITYREPHLSIYDVLEVQKEELDLSKDLMVLPNAPNRVFAWETGWTPGLRSLENDGTKLLDRIRDNYEGEFYWRYFAFIADALITTLKPRYEDTNIRINLDSNTRSFIVPIITTEYIREKLSYSFYGSGGTYALSLSQYNMGINIELSESDVWIIDVDNVVRDVTIESDKIKKGDLIEGILSTLSIEENKIILNSHEINFSGEVNGNNGFVSLTFSILEGINAIIEVDLLSKSYKLLISGELKILMLNSNHIQQKIDYIGFNSELQKNIPYSFVDSEGKENGFINGSTKEGLFVSELPDVVLISKVYMDDSKPSFGYYSNNLKDVKVITKDNVNILTGCYLKDDIKISLSLTLQDEKTIKLNSVHLDESGVAEILKFMNRKGSTNTSDSLMSFLESMNIKSIFVNFLQSNIKFILDANFIISGTTSIGQFEFICDENDNIQPYFIKFNTLETNYTLYVGNRQNMIVEPNYDLDDSGDISSTVINFSQKYLYGIDSCVNKVVISPNIYTDEINITPVYETNNTYPEVIVLDANYINEKINVNINDLSIRYVWSNDGNDFILMSTSEENKVSQVKIRFVNVFKDKTLANKLSFNFSDKQDVPVSEIILSFTPSYYEDGLIGYDLGLVSLYNEKFYINNFGMMVSGLIYINDSLYYFKPPVNNLITGFVTVGDDKYYFNPINGGAASIGETIIDDKNYYFNQSGVLQTGVFSTEDGFKYFAPANTLDENLEGEAIDFTGKLIIDENIYYFEDNYRGAVEWKELDGEMHYFSPETGKAFKGLNQIGDDKYYFNSDGVMQKGFVSINDNKHYFDDSGVMKVGYTEIDGKHFYFAENGEMQIGVFNTEDGFKYFAHHNEDLGNEEGEEISYSGILNFNNKIYYFDDSFTAVVGWKDLEDGSKYYFDEDTAEAYIGLSLINDGQYYFNDDGIMQVGFVTINDKVFYFSDSGIIESGVQNIDDNYFYIDDNGIVQIGVFDTSDGYKYFAPANTVNDNIYGQAVEYSGLVRVGEDVYYFGETYTIETGWIYDMENESDKYYFNPETKKACKGINLIDDIKYYFDEKGIMRTGLISFENNNYYFNENGEMQFGYINIEDKMFYFGEDGVMQIGVFNTPDGFKYFAHQNTLDENFEGESINYTGWLDLDEKRYYFTDEYIAATGSVIIDGEEYYFDPDTAQLVISE

SEQ ID NO: 838 - protein, 2366 aa, Clostridium difficile
MSLVNRKQLEKMANVRFRTQEDEYVAILDALEEYHNMSENTVVEKYLKLKDINSLTDIYIDTYKKSGRNKALKKFKEYLVTEVLELKNNNLTPVEKNLHFVWIGGQINDTAINYINQWKDVNSDYNVNVFYDSNAFLINTLKKTVVESAINDTLESFRENLNDPRFDYNKFFRKRMEIIYDKQKNFINYYKAQREENPELIIDDIVKTYLSNEYSKEIDELNTYIEESLNKITQNSGNDVRNFEEFKNGESFNLYEQELVERWNLAAASDILRISALKEIGGMYLDVDMLPGIQPDLFESIEKPSSVTVDFWEMTKLEAIMKYKEYIPEYTSEHFDMLDEEVQSSFESVLASKSDKSEIFSSLGDMEASPLEVKIAFNSKGIINQGLISVKDSYCSNLIVKQIENRYKILNNSLNPAISEDNDFNTTTNTFIDSIMAEANADNGRFMMELGKYLRVGFFPDVKTTINLSGPEAYAAAYQDLLMFKEGSMNIHLIEADLRNFEISKTNISQSTEQEMASLWSFDDARAKAQFEEYKRNYFEGSLGEDDNLDFSQNIVVDKEYLLEKISSLARSSERGYIHYIVQLQGDKISYEAACNLFAKTPYDSVLFQKNIEDSEIAYYYNPGDGEIQEIDKYKIPSIISDRPKIKLTFIGHGKDEFNTDIFAGFDVDSLSTEIEAAIDLAKEDISPKSIEINLLGCNMFSYSINVEETYPGKLLLKVKDKISELMPSISQDSIIVSANQYEVRINSEGRRELLDHSGEWINKEESIIKDISSKEYISFNPKENKITVKSKNLPELSTLLQEIRNNSNSSDIELEEKVMLTECEINVISNIDTQIVEERIEEAKNLTSDSINYIKDEFKLIESISDALCDLKQQNELEDSHFISFEDISETDEGFSIRFINKETGESIFVETEKTIFSEYANHITEEISKIKGTIFDTVNGKLVKKVNLDTTHEVNTLNAAFFIQSLIEYNSSKESLSNLSVAMKVQVYAQLFSTGLNTITDAAKVVELVSTALDETIDLLPTLSEGLPIIATIIDGVSLGAAIKELSETSDPLLRQEIEAKIGIMAVNLTTATTAIITSSLGIASGFSILLVPLAGISAGIPSLVNNELVLRDKATKVVDYFKHVSLVETEGVFTLLDDKIMMPQDDLVISEIDFNNNSIVLGKCEIWRMEGGSGHTVTDDIDHFFSAPSITYREPHLSIYDVLEVQKEELDLSKDLMVLPNAPNRVFAWETGWTPGLRSLENDGTKLLDRIRDNYEGEFYWRYFAFIADALITTLKPRYEDTNIRINLDSNTRSFIVPIITTEYIREKLSYSFYGSGGTYALSLSQYNMGINIELSESDVWIIDVDNVVRDVTIESDKIKKGDLIEGILSTLSIEENKIILNSHEINFSGEVNGSNGFVSLTFSILEGINAIIEVDLLSKSYKLLISGELKILMLNSNHIQQKIDYIGFNSELQKNIPYSFVDSEGKENGFINGSTKEGLFVSELPDVVLISKVYMDDSKPSFGYYSNNLKDVKVITKDNVNILTGYYLKDDIKISLSLTLQDEKTIKLNSVHLDESGVAEILKFMNRKGSTNTSDSLMSFLESMNIKSIFVNFLQSNIKFILDANFIISGTTSIGQFEFICDENDNIQPYFIKFNTRETNYTLYVGNRQNMIVEPNYDLDDSGDISSTVINFSQKYLYGIDSCVNKVVISPNIYTDEINITPVYETNNTYPEVIVLDTNYINEKINVNINDLSIRYVWSNDGNDFILMSTSEENKVSQVKIRFVNVFKDKTLANKLSFNFSDKQDVPVSEIILSFTPSYYEDGLIGYDLGLVSLYNEKFYINNFGMMVSGLIYINDSLYYFKPPVNNLITGFVTVGDDKYYFNPINGGAASIGETIIDDKNYYFNQSGVLQTGVFSTEDGFKYFAPANTLDENLEGEAIDFTGKLIIDENIYYFDDNYRGAVEWKELDGEMHYFSPETGKAFKGLNQIGDYKYYFNSDGVMQKGFVSINDNKHYFDDSGVMKVGYTEIDGKHFYFAENGEMQIGVFNTEDGFKYFAHHNEDLGNEEGEEISYSGILNFNNKIYYFDDSFTAVVGWKDLEDGSKYYFDEDTAEAYIGLSLINDGQYYFNDDGIMQVGFVTINDKVFYFSDSGIIESGVQNIDDNYFYIDDNGIVQIGVFDTSDGYKYFAPANTVNDNIYGQAVEYSGLVRVGEDVYYFGETYTIETGWIYDMENESDKYYFNPETKKACKGINLIDDIKYYFDEKGIMRTGLISFENNNYYFNENGEMQFGYINIEDKMFYFGEDGVMQIGVFNTPDGFKYFAHQNTLDENFEGESINYTGWLDLDEKRYYFTDEYIAATGSVIIDGEEYYFDPDTAQLVISE

SEQ ID NO: 839 - protein, 2366 aa, Clostridium difficile
MSLVNRKQLEKMANVRFRTQEDEYVAILDALEEYHNMSENTVVEKYLKLKDINSLTDIYIDTYKKSGRNKALKKFKEYLVTEVLELKNNNLTPVEKNLHFVWIGGQINDTAINYINQWKDVNSDYNVNVFYDSNAFLINTLKKTVVESAINDTLESFRENLNDPRFDYNKFFRKRMEIIYDKQKNFINYYKAQREENPELIIDDIVKTYLSNEYSKEIDELNTYIEESLNKITQNSGNDVRNFEEFKNGESFNLYEQELVERWNLAAASDILRISALKEIGGMYLDVDMLPGIQPDLFESIEKPSSVTVDFWEMTKLEAIMKYKEYIPEYTSEHFDMLDEEVQSSFESVLASKSDKSEIFSSLGDMEASPLEVKIAFNSKGIINQGLISVKDSYCSNLIVKQIENRYKILNNSLNPAISEDNDFNTTTNTFIDSIMAEANADNGRFMMELGKYLRVGFFPDVKTTINLSGPEAYAAAYQDLLMFKEGSMNIHLIEADLRNFEISKTNISQSTEQEMASLWSFDDARAKAQFEEYKRNYFEGSLGEDDNLDFSQNIVVDKEYLLEKISSLARSSERGYIHYIVQLQGDKISYEAACNLFAKTPYDSVLFQKNIEDSEIAYYYNPGDGEIQEIDKYKIPSIISDRPKIKLTFIGHGKDEFNTDIFAGFDVDSLSTEIEAAIDLAKEDISPKSIEINLLGCNMFSYSINVEETYPGKLLLKVKDKISELMPSISQDSIIVSANQYEVRINSEGRRELLDHSGEWINKEESIIKDISSKEYISFNPKENKITVKSKNLPELSTLLQEIRNNSNSSDIELEEKVMLTECEINVISNIDTQIVEERIEEAKNLTSDSINYIKDEFKLIESISDALCDLKQQNELEDSHFISFEDISETDEGFSIRFINKETGESIFVETEKTIFSEYANHITEEISKIKGTIFDTVNGKLVKKVNLDTTHEVNTLNAAFFIQSLIEYNSSKESLSNLSVAMKVQVYAQLFSTGLNTITDAAKVVELVSTALDETIDLLPTLSEGLPIIATIIDGVSLGAAIKELSETSDPLLRQEIEAKIGIMAVNLTTATTAIITSSLGIASGFSILLVPLAGISAGIPSLVNNELVLRDKATKVVDYFKHVSLVETEGVFTLLDDKIMMPQDDLVISEIDFNNNSIVLGKCEIWRMEGGSGHTVTDDIDHFFSAPSITYREPHLSIYDVLEVQKEELDLSKDLMVLPNAPNRVFAWETGWTPGLRSLENDGTKLLDRIRDNYEGEFYWRYFAFIADALITTLKPRYEDTNIRINLDSNTRSFIVPIITTEYIREKLSYSFYGSGGTYALSLSQYNMGINIELSESDVWIIDVDNVVRDVTIESDKIKKGDLIEGILSTLSIEENKIILNSHEINFSGEVNGSNGFVSLTFSILEGINAIIEVDLLSKSYKLLISGELKILMLNSNHIQQKIDYIGFNSELQKNIPYSFVDSEGKENGFINGSTKEGLFVSELPDVVLISKVYMDDSKPSFGYYSNNLKDVKVITKDNVNILTGYYLKDDIKISLSLTLQDEKTIKLNSVHLDESGVAEILKFMNRKGNTNTSDSLMSFLESMNIKSIFVNFLQSNIKFILDANFIISGTTSIGQFEFICDENDNIQPYFIKFNTLETNYTLYVGNRQNMIVEPNYDLDDSGDISSTVINFSQKYLYGIDSCVNKVVISPNIYTDEINITPVYETNNTYPEVIVLDANYINEKINVNINDLSIRYVWSNDGNDFILMSTSEENKVSQVKIRFVNVFKDKTLANKLSFNFSDKQDVPVSEIILSFTPSYYEDGLIGYDLGLVSLYNEKFYINNFGMMLSGLIYINDSLYYFKPPVNNLITGFVTVGDDKYYFNPINGGAASIGETIIDDKNYYFNQSGVLQTGVFSTEDGFKYFAPANTLDENLEGEAIDFTGKLIIDENIYYFDDNYRGAVEWKELDGEMHYFSPETGKAFKGLNQIGDDKYYFNSDGVMQKGFVSINDNKHYFDDSGVMKVGYTEIDGKHFYFAENGEMQIGVFNTEDGFKYFAHHNEDLGNEEGEEISYSGILNFNNKIYYFDDSFTAVVGWKDLEDGSKYYFDEDTAEAYIGLSLINDGQYYFNDDGIMQVGFVTINDKVFYFSDSGIIESGVQNIDDNYLYIDDNGIVQIGVFDTSDGYKYFAPANTVNDNIYGQAVEYSGLVRVGEDVYYFGETYTIETGWIYDMENESDKYYFNPETKKACKGINLIDDIKYYFDEKGIMRTGLISFENNNYYFNENGEMQFGYINIEDKMFYFGEDGVMQIGVFNTPDGFKYFAHQNTLDENFEGESINYTGWLDLDEKRYYFTDEYIAATGSVIIDGEEYYFDPDTAQLVISE

SEQ ID NO: 840 - protein, 2366 aa, Clostridium difficile
MSLVNRKQLEKMANVRFRTQEDEYVAILDALEEYHNMSENTVVEKYLKLKDINSLTDIYIDTYKKSGRNKALKKFKEYLVTEVLELKNNNLTPVEKNLHFVWIGGQINDTAINYINQWKDVNSDYNVNVFYDSNAFLINTLKKTIVESATNDTLESFRENLNDPRFDYNKFYRKRMEIIYDKQKNFINYYKTQREENPDLIIDDIVKIYLSNEYSKDIDELNSYIEESLNKVTENSGNDVRNFEEFKGGESFKLYEQELVERWNLAAASDILRISALKEVGGVYLDVDMLPGIQPDLFESIEKPSSVTVDFWEMVKLEAIMKYKEYIPGYTSEHFDMLDEEVQSSFESVLASKSDKSEIFSSLGDMEASPLEVKIAFNSKGIINQGLISVKDSYCSNLIVKQIENRYKILNNSLNPAISEDNDFNTTTNAFIDSIMAEANADNGRFMMELGKYLRVGFFPDVKTTINLSGPEAYAAAYQDLLMFKEGSMNIHLIEADLRNFEISKTNISQSTEQEMASLWSFDDARAKAQFEEYKKNYFEGSLGEDDNLDFSQNTVVDKEYLLEKISSLARSSERGYIHYIVQLQGDKISYEAACNLFAKTPYDSVLFQKNIEDSEIAYYYNPGDGEIQEIDKYKIPSIISDRPKIKLTFIGHGKDEFNTDIFAGLDVDSLSTEIETAIDLAKEDISPKSIEINLLGCNMFSYSVNVEETYPGKLLLRVKDKISELMPSISQDSIIVSANQYEVRINSEGRRELLDHSGEWINKEESIIKDISSKEYISFNPKENKIIVKSKNLPELSTLLQEIRNNSNSSDIELEEKVMLAECEINVISNIDTQVVEERIEEAKSLTSDSINYIKNEFKLIESISDALYDLKQQNELEESHFISFEDISETDEGFSIRFIDKETGESIFVETEKAIFSEYANHITEEISKLKDTIFDTVNGKLVKKVNLDATHEVNTLNAAFFIQSLIEYNSSKESLSNLSVAMKVQVYAQLFSTGLNTITDAAKVVELVSTALDETIDLLPTLSEGLPVIATIIDGVSLGAAIKELSETSDPLLRQEIEAKIGIMAVNLTAATTAIITSSLGIASGFSILLVPLAGISAGIPSLVNNELILRDKATKVVDYFSHISLAESEGAFTSLDDKIMMPQDDLVISEIDFNNNSITLGKCEIWRMEGGSGHTVTNDIDHFFSSPSITYREPHLSIYDVLEVKKEELDLSKDLMVLPNAPNRVFGWETGWTPGLRSLENDGTKLLDRIRDQYEGQFYWRFLAFIADALITTLKPRYEDTNVRISLDSNTRSFIVPVITTEYIREKLSYSFYGSGGTYALSLSQYNMNINIELNENDTWVIDVDNVVRDVTIESDKIKKGDLIENILSKLSIEDNKIILDNHEINFSGTLNGGNGFVSLTFSILEGINAVIEVDLLSKSYKVLISGELKTLMANSNSVQQKIDYIGLNSELQKNIPYSFMDDKGKENGFINCSTKEGLFVSELSDVVLISKVYMDNSKPLFGYCSNDLKDVKVITKDDVIILTGYYLKDDIKISLSFTIQDENTIKLNGVYLDENGVAEILKFMNKKGSTNTSDSLMSFLESMNIKSIFINSLQSNTKLILDTNFIISGATSIGQFEFICDKDNNIQPYFIKFNTLETKYTLYVGNRQNMIVEPNYDLDDSGDISSTVINFSQKYLYGIDSCVNKVIISPNIYTDEINITPIYEANNTYPEVIVLDTNYISEKINININDLSIRYVWSNDGSDFILMSTDEENKVSQVKIRFTNVFKGNTISDKISFNFSDKQDVSINKIISTFTPSYYVEGLLNYHLGLISLYNEKFYINNFGMMVSGLVYINDSLYYFKPPIKNLITGFTTIGDDKYYFNPDNGGAASVGETIIDGKNYYFSQNGVLQTGVFSTEDGFKYFAPADTLDENLEGEAIDFTGKLTIDENVYYFGDNYRAAIEWQTLDDEVYYFSTDTGRAFKGLNQIGDDKFYFNSDGIMQKGFVNINDKTFYFDDSGVMKSGYTEIDGKYFYFAENGEMQIGVFNTADGFKYFAHHDEDLGNEEGEALSYSGILNFNNKIYYFDDSFTAVVGWKDLEDGSKYYFDEDTAEAYIGISIINDGKYYFNDSGIMQIGFVTINNEVFYFSDSGIVESGMQNIDDNYFYIDENGLVQIGVFDTSDGYKYFAPANTVNDNIYGQAVEYSGLVRVGEDVYYFGETYTIETGWIYDMENESDKYYFDPETKKAYKGINVIDDIKYYFDENGIMRTGLITFEDNHYYFNEDGIMQYGYLNIEDKTFYFSEDGIMQIGVFNTPDGFKYFAHQNTLDENFEGESINYTGWLDLDEKRYYFTDEYIAATGSVIIDGEEYYFDPDTAQLVISE

SEQ ID NO: 841 - protein, 664 aa, Clostridium difficile
QVQLQQPGAALVKSGASVKLSCKASGYTFTSYWIHWVKQRPGQGLEWIGVINPSNGRSSYNEKFKSKATLTVDKSSSTAYMQFNSLTSEDSAVYYCARAYYGTSYYAMDYWGQGTSVTVSSAKTTPPSVYPLAPGSAAQTNSMVTLGCLVKGYFPEPVTVTWNSGSLSSGVHTFPAVLESDLYTLSSSVTVPSSPRPSETVTCNVAHPASSTKVDKKIVPRDCGCKPCICTVPEVSSVFIFPPKPKDVLTITLTPKVTCVVVDISKDDPEVQFSWFVDDVEVHTAQTQPREEQFNSTFRSVSELPIMHQDWLNGKEFKCRVNSAAFPAPIEKTISKTKGRPKAPQVYTIPPPKEQMAKDKVSLTCMITDFFPEDITVEWQWNGQPAENYKNTQPIMNTNGSYFVYSKLNVQKSNWEAGNTFTCSVLHEGLHNHHTEKSLSHSPGKDVLMTQTPLSLPVSLGDQASISCRSSQSIVHSNGNTYLEWYLQTPGQSPKLLIYKVSNRFSGVPDRFSGSGSGTDFTLKISRVEAEDLGVYYCFQGSHFPFTFGTGTKLEIKRADAAPTVSIFPPSSEQLTSGGASVVCFLNNFYPKDINVKWKIDGSERQNGVLNSWTDQDSKDSTYSMSSTLTLTKDEYERHNSYTCEATHKTSTSPIVKSFNRNEC

SEQ ID NO: 842 - protein, 21 aa, Artificial Sequence
  Synthetic amino acid sequence
KNIAYNYTDESNNKYFGAISK

SEQ ID NO: 843 - protein, 13 aa, Artificial Sequence
  Synthetic amino acid sequence
SKKYGPLKTEDDK

SEQ ID NO: 844 - protein, 4 aa, Artificial Sequence
  Synthetic amino acid sequence
IYSA

SEQ ID NO: 845 - protein, 13 aa, Artificial Sequence
  Synthetic amino acid sequence
LRSLENDGTRLLD

SEQ ID NO: 846 - protein, 8 aa, Artificial Sequence
  Synthetic amino acid sequence
FNHLSESK

SEQ ID NO: 847 - protein, 10 aa, Artificial Sequence
  Synthetic amino acid sequence
SAIGIETENL

SEQ ID NO: 848 - protein, 9 aa, Artificial Sequence
  Synthetic amino acid sequence
ENDGTRLLD

SEQ ID NO: 849 - protein, 13 aa, Artificial Sequence
  Synthetic amino acid sequence
SKKYGPLKTEDDK

SEQ ID NO: 850 - protein, 13 aa, Artificial Sequence
  Synthetic amino acid sequence
LRSLENDGTRLLD

SEQ ID NO: 851 - protein, 15 aa, Artificial Sequence
  Synthetic amino acid sequence
HLSESKKYGPLKTED

SEQ ID NO: 852 - protein, 9 aa, Artificial Sequence
  Synthetic amino acid sequence
SLENDGTRL

SEQ ID NO: 853 - protein, 11 aa, Artificial Sequence
  Synthetic amino acid sequence
SKKYGPLKTED

SEQ ID NO: 854 - protein, 8 aa, Artificial Sequence
  Synthetic amino acid sequence
LENDGTRL

SEQ ID NO: 855 - protein, 11 aa, Artificial Sequence
  Synthetic amino acid sequence
AGIPSLVNNEL

SEQ ID NO: 856 - protein, 13 aa, Artificial Sequence
  Synthetic amino acid sequence
MPTITTNEIRNKL

SEQ ID NO: 857 - protein, 10 aa, Artificial Sequence
  Synthetic amino acid sequence
LSSYPISTNI

SEQ ID NO: 858 - protein, 7 aa, Artificial Sequence
  Synthetic amino acid sequence
SIENGTI

SEQ ID NO: 859 - protein, 10 aa, Artificial Sequence
  Synthetic amino acid sequence
NKLIIGNQTI

SEQ ID NO: 860 - protein, 35 aa, Artificial Sequence
  Synthetic amino acid sequence
ISIENGTIKKGKLIKDVLSKIDINKNKLIIGNQTI

SEQ ID NO: 861 - protein, 24 aa, Artificial Sequence
  Synthetic amino acid sequence
NTNTAEAATGWQTIDGKKYYFNTN

SEQ ID NO: 862 - protein, 18 aa, Artificial Sequence
  Synthetic amino acid sequence
AATGWQTIDGKKYYFNTN

SEQ ID NO: 863 - protein, 18 aa, Artificial Sequence
  Synthetic amino acid sequence
AATGWQTIDGKKYYFNLN

SEQ ID NO: 864 - protein, 18 aa, Artificial Sequence
  Synthetic amino acid sequence
AATGWQTIDGKKYYFNTN

SEQ ID NO: 865 - protein, 67 aa, Artificial Sequence
  Synthetic amino acid sequence
AVTGLQTIDSKKYYFNTNTAEAATGWQTIDGKKYYFNTNTAEAATGWQTIDGKKYYFNTNTAIASTG

SEQ ID NO: 866 - protein, 17 aa, Artificial Sequence
  Synthetic amino acid sequence
AATGWQTIDGKKYYFNL

SEQ ID NO: 867 - protein, 19 aa, Artificial Sequence
  Synthetic amino acid sequence
AVTGWQTINGKKYYFNTNT

SEQ ID NO: 868 - protein, 41 aa, Artificial Sequence
  Synthetic amino acid sequence
AATGWQTIDGKKYYFNLNTAEAATGWQTIDGKKYYFNTNTF

SEQ ID NO: 869 - protein, 31 aa, Artificial Sequence
  Synthetic amino acid sequence
TGWQTIDGKKYYFNTNTAIASTGYTIINGKH

SEQ ID NO: 870 - protein, 63 aa, Artificial Sequence
  Synthetic amino acid sequence
WQTIDGKKYYFNLNTAEAATGWQTIDGKKYYFNLNTAEAATGWQTIDGKKYYFNTNTFIASTG

SEQ ID NO: 871 - protein, 8 aa, Artificial Sequence
  Synthetic amino acid sequence
VNRKQLEK

SEQ ID NO: 872 - protein, 8 aa, Artificial Sequence
  Synthetic amino acid sequence
FRTQEDEY

SEQ ID NO: 873 - protein, 11 aa, Artificial Sequence
  Synthetic amino acid sequence
LFESIEKPSSV

SEQ ID NO: 874 - protein, 15 aa, Artificial Sequence
  Synthetic amino acid sequence
FESVLASKSDKSEIF

SEQ ID NO: 875 - protein, 11 aa, Artificial Sequence
  Synthetic amino acid sequence
ESIEKPSSVTV

SEQ ID NO: 876 - protein, 13 aa, Artificial Sequence
  Synthetic amino acid sequence
VQSSFESVLASKS

SEQ ID NO: 877 - protein, 9 aa, Artificial Sequence
  Synthetic amino acid sequence
WINKEESII

SEQ ID NO: 878 - protein, 5 aa, Artificial Sequence
  Synthetic amino acid sequence
ITPVY

SEQ ID NO: 879 - protein, 11 aa, Artificial Sequence
  Synthetic amino acid sequence
NVNINDLSIRY

SEQ ID NO: 880 - protein, 14 aa, Artificial Sequence
  Synthetic amino acid sequence
NFSDKQDVPVSEII

SEQ ID NO: 881 - protein, 5 aa, Artificial Sequence
  Synthetic amino acid sequence
DLSIR

SEQ ID NO: 882 - protein, 9 aa, Artificial Sequence
  Synthetic amino acid sequence
DKQDVPVSE

SEQ ID NO: 883 - protein, 16 aa, Artificial Sequence
  Synthetic amino acid sequence
IETGWIYDMENESDKY

SEQ ID NO: 884 - protein, 11 aa, Artificial Sequence
  Synthetic amino acid sequence
GVFNTPDGFKY

SEQ ID NO: 885 - protein, 4 aa, Artificial Sequence
  Synthetic amino acid sequence
TGSV

SEQ ID NO: 886 - protein, 9 aa, Artificial Sequence
  Synthetic amino acid sequence
VTINDKVFY

SEQ ID NO: 887 - protein, 12 aa, Artificial Sequence
  Synthetic amino acid sequence
IDDNGIVQIGVF
